United States Patent Application Publication US 2026/0325622 A1, published October 22, 2026 (application 19/107,742).

The application's sequence listing, which the Patent Office published only in electronic form, follows.

SEQUENCE LISTING (407 sequences)

SEQ ID NO: 1 - protein, 4 aa, Human immunodeficiency virus
GDIK

SEQ ID NO: 2 - protein, 4 aa, synthetic construct
GDIR

SEQ ID NO: 3 - protein, 4 aa, synthetic construct
VDTA

SEQ ID NO: 4 - protein, 4 aa, Human immunodeficiency virus
REKR

SEQ ID NO: 5 - protein, 9 aa, Human immunodeficiency virus
RRVVEREKR

SEQ ID NO: 6 - protein, 9 aa, synthetic construct
ERVVEREKE

SEQ ID NO: 7 - protein, 4 aa, synthetic construct
SEKS

SEQ ID NO: 8 - protein, 79 aa, synthetic construct
MRVMGIQRNYPQWWIWSMLGFWMLMICNGMWVTVYYGVPVWKEAKTTLFCASDAKAYEKEVHNVWATHACVPTDPNPQE

SEQ ID NO: 9 - protein, 24 aa, Homo sapiens
MPMGSLQPLATLYLLGMLVASVLA

SEQ ID NO: 10 - protein, 5 aa, synthetic construct
  VARIANT 3: note = any amino acid but most commonly Ala, Ser, Glu
LPXTG

SEQ ID NO: 11 - protein, 6 aa, synthetic construct
  VARIANT 3: note = any amino acid but most commonly Ala, Ser, Glu
LPXTGG

SEQ ID NO: 12 - protein, 5 aa, synthetic construct
GGGGG

SEQ ID NO: 13 - protein, 127 aa, synthetic construct
QVQLVQSGAEVKKPGASVKVSCKASGYTFTGYYMHWVRQAPGQGLEWMGWINPNSGGTNYAQKFQGRVTMTRDTSISTAYMELSRLRSDDTAVYYCARGGWIGLYYDSSGYPNFDYWGQGTLVTVSS

SEQ ID NO: 14 - protein, 127 aa, synthetic construct
QVQLVQSGAEVKKPGASVKVSCKASGYTFTDYYIHWVRQAPGQGLEWMGWINPNTGRTNSAQKFQGRVTMTRDTSISTAYMELSRLRSDDTAVYYCARGGWIGLYYDSSGYPNFDYWGQGTLVTVSS

SEQ ID NO: 15 - protein, 110 aa, synthetic construct
QSALTQPASVSGSPGQSITISCTGTSSDVGSYNLVSWYQQHPGKAPKLMIYEVSKRPSGVSNRFSGSKSGNTASLTISGLQAEDEADYYCCSYAGSSTVVFGGGTKLTVL

SEQ ID NO: 16 - protein, 110 aa, synthetic construct
QSALTQPASVSGSPGQSITISCTGTSYDVGSYNLVSWYQQHPGKAPKLMIYEVSKRPSGVSNRFSGSKSGNTASLTISGLQAEDEADYYCCSYAGSSTVVFGGGTKLTVL

SEQ ID NO: 17 - protein, 127 aa, synthetic construct
QVQLVQSGAEMKKPGASVKVSCKASGYTFTDYYIHWVRQAPGQGLEWMGWINPNTGRTNSAQKFQGRVTMTRDTSISTAYMELSRLTSDDTAVYYCATGGWIGLYYDSSGYPNFDYWGQGTLVTVSS

SEQ ID NO: 18 - protein, 127 aa, synthetic construct; identical to SEQ ID NO: 14

SEQ ID NO: 19 - protein, 127 aa, synthetic construct
QVQLVQSGAEVKKPGASVKVSCKASGYTFTDYYIHWVRQAPGQGLEWMAWINPTTGRTNSARKFQGRVTMTRDTSISTAYMELRRLRSDDTAVYYCARGGWIGLYVDYSGYPNFDSWGQGTLVTVSS

SEQ ID NO: 20 - protein, 110 aa, synthetic construct
QSALTQPASVSGSPGQSITISCTGTSYDVGSYNLVSWYQQHPGKAPKYMIYEVNKRPSGVSNRFSGSKSGNTASLTISGLQAEDEADYYCCSYAGSSTVVFGGGTKLTVL

SEQ ID NO: 21 - protein, 110 aa, synthetic construct; identical to SEQ ID NO: 16

SEQ ID NO: 22 - protein, 110 aa, synthetic construct
QSALTQPASVSGSPGQSITISCTGTSYDVGSYNLVSWYQQHPGKAPKLMIYEVSKWPSGVSNRFSGSKSGNTASLTISGLQAEDEADYYCCSYAGSSTVIFGGGTKLTVL

SEQ ID NO: 23 - protein, 127 aa, synthetic construct
QVQLVQSGAEMKNPGASVKVSCAASGYTFTDFYIHWVRQAPGQGLQWMGWMNPKTGRTNTAQNFQGRVTMTRDTSIGTAYMELRSLTSDDTAVYYCATGGWISLYYDSSYYPNFDHWGQGTLVTVSS

SEQ ID NO: 24 - protein, 127 aa, synthetic construct; identical to SEQ ID NO: 17

SEQ ID NO: 25 - protein, 127 aa, synthetic construct
QVQLVQSGAEMKKPGASVRVSCKASGYTFTDYYIHWVRQAPGQGPEWMGWINPSTGRTNSPQKFQGRVTMTRDTSISTAYMDLNRLTSDDTAMYYCTTGGWIGLYSDTSGYPNFDYWGQGTLVTVSS

SEQ ID NO: 26 - protein, 110 aa, synthetic construct
QSALTQPASVSGSPGQSITISCTGTSYDVGSYDLVSWYQQHPGKAPKYMIYEVNKRPSGVSNRFSGSKSGNTASLTISGLQAEDEADYYCCSFGGSATVVCGGGTKVTVL

SEQ ID NO: 27 - protein, 110 aa, synthetic construct; identical to SEQ ID NO: 20

SEQ ID NO: 28 - protein, 110 aa, synthetic construct
QSALTQPASVSGSPGQSITISCTGTNYDVGSYNLVSWYQQHPGKVPKYIIYEVNKRPSGVSNRFSGSKSGNTASLTISGLQAEDEATYYCCSYAGSSIIFFGGGTKLTVL

SEQ ID NO: 29 - protein, 127 aa, synthetic construct
EVQLVESGPELKEPGASVKVSCKASGYTFTDYYIHWVRQAPGQGLEWMAWINPTTGRSSFARGFQGRVTMTRETSVSTAYMELRRLRSDDTAVYYCAKAGYIALYVDYSGYPNFNSWGQGTLVTVSS

SEQ ID NO: 30 - protein, 127 aa, synthetic construct; identical to SEQ ID NO: 19

SEQ ID NO: 31 - protein, 127 aa, synthetic construct
QVQLVQSGAELKKPGASVKVSCKASGYTLSDYYVHWLRQAPGQGLEWVAWINPTSGRTISPRKFQGRVTMTTDTSMNVAYMELRGLRSDDTAVYFCARGGWISLYVDYSYYPNFDSWGQGTLVSVSS

SEQ ID NO: 32 - protein, 110 aa, synthetic construct
QSALTQPASVSGSPGQSITISCTGTSYDVGSYNLVSWYQQHPGKAPKLIIYEVSQWPSGVSKRFSGSKSGNTASLTISGLQAEDEAHYYCCSYAGSSTVIFGGGTSLTVL

SEQ ID NO: 33 - protein, 110 aa, synthetic construct; identical to SEQ ID NO: 22

SEQ ID NO: 34 - protein, 109 aa, synthetic construct
QPVLTQPASVSGSPGQSITISCTGSSSDVGSYNLVSWYQQHPGKAPKLMIYEVNKWASGVSDRFAGSKSGNTASLTISRLQAEDEANYFCSSTNSATVIFGGGTKLTVL

SEQ ID NO: 35 - protein, 127 aa, synthetic construct
QVQLVQSGAEMKNPGASVKVSCAASGYTFTDFYIHWVRLAPGQGLQWMGWMNPKTGRTNNAQNFQGRVTMTRDTSIGTAYMELRSLTSDDTAVYYCVTGGWISLYYDSSYYPNFDHWGQGTLVTVSS

SEQ ID NO: 36 - protein, 127 aa, synthetic construct; identical to SEQ ID NO: 23

SEQ ID NO: 37 - protein, 127 aa, synthetic construct
QVQLVQSGAQMKNPGASVKVSCAPSGYTFTDFYIHWLRQAPGQGLQWMGWMNPQTGRTNTARNFQGRVTMTRDTSIGTAYMELRSLTSDDTAIYYCTTGGWISLYYDSSYYPNFDHWGQGTLLTVSS

SEQ ID NO: 38 - protein, 110 aa, synthetic construct
QSALTQPASVSGSPGQSITISCTGTSYDVGKFDLVSWYQQHPGKAPKYMIYEVNKWPSGVSHRFSGSKSGNTASLTISGLQAEDEADYYCCSFGGSATVVCGGGTKVTVL

SEQ ID NO: 39 - protein, 110 aa, synthetic construct; identical to SEQ ID NO: 26

SEQ ID NO: 40 - protein, 110 aa, synthetic construct
TSLLTQPASVSGSPGQSITISCTGTKYDVGSHDLVSWYQQYPGKVPKYMIYEVNKRPSGVSNRFSGSKSGNTASLTISGLRAEDEADYYCCSFGGSATVVCGGGTKVTVL

SEQ ID NO: 41 - protein, 127 aa, synthetic construct
EVQLVQSGAEMKNPGASVKVSCAASGYGFTDFYIHWVRLAPGHGLQWMGWMNPKTGRTNNAQDFQGRVTLTRDTSIGTAYMELRRLTSDDTAVYYCVTGGWISPYYDSSYYPNFDHWGQGTLITVSS

SEQ ID NO: 42 - protein, 127 aa, synthetic construct; identical to SEQ ID NO: 35

SEQ ID NO: 43 - protein, 127 aa, synthetic construct
QVQLVQSGAEVKNPGASVKVSCAPSGYTFTDFYIHWVRLAPGQGLEWLGWMNPKTGRTNQGQNFQGRVTMTRDTSIGTAYMELRSLTSDDTAVYYCVTGAWISDYYDSSYYPNFDHWGQGTLVTVSS

SEQ ID NO: 44 - protein, 110 aa, synthetic construct
QSALTQPASVSGSPGQSITISCTGTSYDVAKFDLVSWFQQHPGKAPKYMIYEVNKWPSGVSHRFSGSKSGNTASLTISGLQAEDEADYYCCSFGGSATVVCGGGTKVTVL

SEQ ID NO: 45 - protein, 110 aa, synthetic construct; identical to SEQ ID NO: 38

SEQ ID NO: 46 - protein, 110 aa, synthetic construct
LPVLTQPASVSGSPGQSITISCTGTIYDVGKFDLVSWYQHHPGKAPKYLIYEVKKWPSGVSHRFSGSKSGNTASLTISGLQVEDEADYYCCSFGGSAAVVCGGGTKVTVL

SEQ ID NO: 47 - DNA, 1981 bp, synthetic construct
  source 1..1981: mol_type = other DNA
gtcgacaagcttcccgggccaccatgggctccctgcagcccctggccaccctgtacctgctgggcatgctggtggcctccgtgctggccgccgagaacctgtgggtgaccgtgtactacggcgtgcccgtgtggaaggaggccaagaccaccctgttctgcgcctccgacgcccgcgcctacgagaaggaggtgcacaacgtgtgggccacccacgcctgcgtgcccaccgacccctccccccaggagctggtgctgggcaacgtgaccgagaacttcaacatgtggaagaacgacatggtggaccagatgcacgaggacatcatctccctgtgggaccagtccctgaagccctgcgtgaagctgacccccctgtgcgtgaccctgatctgctccaacgccaccgtgaagaacggcaccgtggaggagatgaagaactgctccttcaacaccaccaccgagatccgcgacaaggagaagaaggagtacgccctgttctacaagcccgacatcgtgcccctgtccgagaccaacaacacctccgagtaccgcctgatcaactgcaacacctccgcctgcacccaggcctgccccaaggtgaccttcgagcccatccccatccactactgcgcccccgccggctacgccatcctgaagtgcaacgacgagaccttcaacggcaccggcccctgctccaacgtgtccaccgtgcagtgcacccacggcatccgccccgtggtgtccacccagctgctgctgaacggctccctggccgagaaggagatcgtgatccgctccgagaacctgaccaacaacgccaagatcatcatcgtgcacctgcacacccccgtggagatcgtgtgcacccgccccgggaacaacacccgcaagtccgtgcgcatcggccccggccagaccttctacgccaccggcgacatcatcggcgacatcaagcaggcccactgcaacatctccgaggagaagtggaacgacaccctgcagaaggtgggcatcgagctgcagaagcacttccccaacaagaccatcaagtacaaccagtccgccggcggcgacatggagatcaccacccactccttcaactgcggcggcgagttcttctactgcaacacctccaacctgttcaacggcacctacaacggcacctacatctccaccaactcctccgccaactccacctccaccatcaccctgcagtgccgcatcaagcagatcatcaacatgtggcagggcgtgggccgctgcatgtacgccccccccatcgccggcaacatcacctgccgctccaacatcaccggcctgctgctgacccgcgacggcggcaccaactccaacgagaccgagaccttccgccccgccggcggcgacatgcgcgacaactggcgctccgagctgtacaagtacaaggtggtgaagatcgagcccctgggcgtggcccccacccgctgcaagcgccgcgtggtgggccgccgccgccgccgccgcgccgtgggcatcggcgccgtgttcctgggcttcctgggcgccgccggctccaccatgggcgccgcctccatgaccctgaccgtgcaggcccgcaacctgctgtccggcatcgtgcagcagcagtccaacctgctgcgcgcccccgaggcccagcagcacctgctgaagctgaccgtgtggggcatcaagcagctgcaggcccgcgtgctggccgtggagcgctacctgcgcgaccagcagctgctgggcatctggggctgctccggcaagctgatctgctgcaccaacgtgccctggaactcctcctggtccaaccgcaacctgtccgagatctgggacaacatgacctggctgcagtgggacaaggagatctccaactacacccagatcatctacggcctgctggaggagtcccagaaccagcaggagaagaacgagcaggacctgctggccctggactgataagcggccgcggatcc

SEQ ID NO: 48 - protein, 646 aa, synthetic construct
MGSLQPLATLYLLGMLVASVLAAENLWVTVYYGVPVWKEAKTTLFCASDARAYEKEVHNVWATHACVPTDPSPQELVLGNVTENFNMWKNDMVDQMHEDIISLWDQSLKPCVKLTPLCVTLICSNATVKNGTVEEMKNCSFNTTTEIRDKEKKEYALFYKPDIVPLSETNNTSEYRLINCNTSACTQACPKVTFEPIPIHYCAPAGYAILKCNDETFNGTGPCSNVSTVQCTHGIRPVVSTQLLLNGSLAEKEIVIRSENLTNNAKIIIVHLHTPVEIVCTRPGNNTRKSVRIGPGQTFYATGDIIGDIKQAHCNISEEKWNDTLQKVGIELQKHFPNKTIKYNQSAGGDMEITTHSFNCGGEFFYCNTSNLFNGTYNGTYISTNSSANSTSTITLQCRIKQIINMWQGVGRCMYAPPIAGNITCRSNITGLLLTRDGGTNSNETETFRPAGGDMRDNWRSELYKYKVVKIEPLGVAPTRCKRRVVGRRRRRRAVGIGAVFLGFLGAAGSTMGAASMTLTVQARNLLSGIVQQQSNLLRAPEAQQHLLKLTVWGIKQLQARVLAVERYLRDQQLLGIWGCSGKLICCTNVPWNSSWSNRNLSEIWDNMTWLQWDKEISNYTQIIYGLLEESQNQQEKNEQDLLALD

SEQ ID NO: 49 - DNA, 1981 bp, synthetic construct
  source 1..1981: mol_type = other DNA
gtcgacaagcttcccgggccaccatgggctccctgcagcccctggccaccctgtacctgctgggcatgctggtggcctccgtgctggccgccgagaacctgtgggtgaccgtgtactacggcgtgcccgtgtggaaggaggccaagaccaccctgttctgcgcctccgacgcccgcgcctacgagaaggaggtgcacaacgtgtgggccacccacgcctgcgtgcccaccgacccctccccccaggagctggtgctgggcaacgtgaccgagaacttcaacatgtggaagaacgacatggtggaccagatgcacgaggacatcatctccctgtgggaccagtccctgaagccctgcgtgaagctgacccccctgtgcgtgaccctgatctgctccaacgccaccgtgaagaacggcaccgtggaggagatgaagaactgctccttcaacaccaccaccgagatccgcgacaaggagaagaaggagtacgccctgttctacaagcccgacatcgtgcccctgtccgagaccaacaacacctccgagtaccgcctgatcaactgcaacacctccgcctgcacccaggcctgccccaaggtgaccttcgagcccatccccatccactactgcgcccccgccggctacgccatcctgaagtgcaacgacgagaccttcaacggcaccggcccctgctccaacgtgtccaccgtgcagtgcacccacggcatccgccccgtggtgtccacccagctgctgctgaacggctccctggccgagaaggagatcgtgatccgctccgagaacctgaccaacaacgccaagatcatcatcgtgcacctgcacaagcccgtgacgatcgtgtgcacccgccccgggaacaacacccgcaagtccgtgcgcatcggccccggccagaccttctacgccaccggcgacatcatcggcgacatcaagcaggcccactgcaacatctccgaggagaagtggaacgacaccctgcagaaggtgggcatcgagctgcagaagcacttccccaacaagaccatcaagtacaaccagtccgccggcggcgacatggagatcaccacccactccttcaactgcggcggcgagttcttctactgcaacacctccaacctgttcaacggcacctacaacggcacctacatctccaccaactcctccgccaagtccacctccaccatcaccctgcagtgccgcatcaagcagatcatcaacatgtggcagggcgtgggccgctgcatgtacgccccccccatcgccggcgccatcacctgccgctccaacatcaccggcctgctgctgacccgcgacggcggcaccaactccaacgagaccgagaccttccgccccgccggcggcgacatgcgcgacaactggcgctccgagctgtacaagtacaaggtggtgaagatcgagcccctgggcgtggcccccacccgctgcaagcgccgcgtggtgggccgccgccgccgccgccgcgccgtgggcatcggcgccgtgttcctgggcttcctgggcgccgccggctccaccatgggcgccgcctccatgaccctgaccgtgcaggcccgcaacctgctgtccggcatcgtgcagcagcagtccaacctgctgcgcgcccccgaggcccagcagcacctgctgaagctgaccgtgtggggcatcaagcagctgcaggcccgcgtgctggccgtggagcgctacctgcgcgaccagcagctgctgggcatctggggctgctccggcaagctgatctgctgcaccaacgtgccctggaactcctcctggtccaaccgcaacctgtccgagatctgggacaacatgacctggctgcagtgggacaaggagatctccaactacacccagatcatctacggcctgctggaggagtcccagaaccagcaggagaagaacgagcaggacctgctggccctggactgataagcggccgcggatcc

SEQ ID NO: 50 - protein, 646 aa, synthetic construct
MGSLQPLATLYLLGMLVASVLAAENLWVTVYYGVPVWKEAKTTLFCASDARAYEKEVHNVWATHACVPTDPSPQELVLGNVTENFNMWKNDMVDQMHEDIISLWDQSLKPCVKLTPLCVTLICSNATVKNGTVEEMKNCSFNTTTEIRDKEKKEYALFYKPDIVPLSETNNTSEYRLINCNTSACTQACPKVTFEPIPIHYCAPAGYAILKCNDETFNGTGPCSNVSTVQCTHGIRPVVSTQLLLNGSLAEKEIVIRSENLTNNAKIIIVHLHKPVTIVCTRPGNNTRKSVRIGPGQTFYATGDIIGDIKQAHCNISEEKWNDTLQKVGIELQKHFPNKTIKYNQSAGGDMEITTHSFNCGGEFFYCNTSNLFNGTYNGTYISTNSSAKSTSTITLQCRIKQIINMWQGVGRCMYAPPIAGAITCRSNITGLLLTRDGGTNSNETETFRPAGGDMRDNWRSELYKYKVVKIEPLGVAPTRCKRRVVGRRRRRRAVGIGAVFLGFLGAAGSTMGAASMTLTVQARNLLSGIVQQQSNLLRAPEAQQHLLKLTVWGIKQLQARVLAVERYLRDQQLLGIWGCSGKLICCTNVPWNSSWSNRNLSEIWDNMTWLQWDKEISNYTQIIYGLLEESQNQQEKNEQDLLALD

SEQ ID NO: 51 - DNA, 1981 bp, synthetic construct
  source 1..1981: mol_type = other DNA
gtcgacaagcttcccgggccaccatgggctccctgcagcccctggccaccctgtacctgctgggcatgctggtggcctccgtgctggccgccgagaacctgtgggtgaccgtgtactacggcgtgcccgtgtggaaggaggccaagaccaccctgttctgcgcctccgacgcccgcgcctacgagaaggaggtgcacaacgtgtgggccacccacgcctgcgtgcccaccgacccctccccccaggagctggtgctgggcaacgtgaccgagaacttcaacatgtggaagaacgacatggtggaccagatgcacgaggacatcatctccctgtgggaccagtccctgaagccctgcgtgaagctgacccccctgtgcgtgaccctgatctgctccgacgccaccgtgaagaccggcaccgtggaggagatgaagaactgctccttcaacaccaccaccgagatccgcgacaaggagaagaaggagtacgccctgttctacaagcccgacatcgtgcccctgtccgagaccaacaacacctccgagtaccgcctgatcaactgcaacacctccgcctgcacccaggcctgccccaaggtgaccttcgagcccatccccatccactactgcgcccccgccggctacgccatcctgaagtgcaacgacgagaccttcaacggcaccggcccctgctccaacgtgtccaccgtgcagtgcacccacggcatccgccccgtggtgtccacccagctgctgctgaacggctccctggccgagaaggagatcgtgatccgctccgagaacctgaccaacaacgccaagatcatcatcgtgcacctgcacacccccgtggagatcgtgtgcacccgccccgggaacaacacccgcaagtccgtgcgcatcggccccggccagaccttctacgccaccggcgacatcatcggcgacatcaagcaggcccactgcaacatctccgaggagaagtggaacgacaccctgcagaaggtgggcatcgagctgcagaagcacttccccaacaagaccatcaagtacaaccagtccgccggcggcgacatggagatcaccacccactccttcaactgcggcggcgagttcttctactgcaacacctccaacctgttcaacggcacctacaacggcacctacatctccaccaactcctccgccaactccacctccaccatcaccctgcagtgccgcatcaagcagatcatcaacatgtggcagggcgtgggccgctgcatgtacgccccccccatcgccggcaacatcacctgccgctccaacatcaccggcctgctgctgacccgcgacggcggcaccaactccaacgagaccgagaccttccgccccgccggcggcgacatgcgcgacaactggcgctccgagctgtacaagtacaaggtggtgaagatcgagcccctgggcgtggcccccacccgctgcaagcgccgcgtggtgggccgccgccgccgccgccgcgccgtgggcatcggcgccgtgttcctgggcttcctgggcgccgccggctccaccatgggcgccgcctccatgaccctgaccgtgcaggcccgcaacctgctgtccggcatcgtgcagcagcagtccaacctgctgcgcgcccccgaggcccagcagcacctgctgaagctgaccgtgtggggcatcaagcagctgcaggcccgcgtgctggccgtggagcgctacctgcgcgaccagcagctgctgggcatctggggctgctccggcaagctgatctgctgcaccaacgtgccctggaactcctcctggtccaaccgcaacctgtccgagatctgggacaacatgacctggctgcagtgggacaaggagatctccaactacacccagatcatctacggcctgctggaggagtcccagaaccagcaggagaagaacgagcaggacctgctggccctggactgataagcggccgcggatcc

SEQ ID NO: 52 - protein, 646 aa, synthetic construct
MGSLQPLATLYLLGMLVASVLAAENLWVTVYYGVPVWKEAKTTLFCASDARAYEKEVHNVWATHACVPTDPSPQELVLGNVTENFNMWKNDMVDQMHEDIISLWDQSLKPCVKLTPLCVTLICSDATVKTGTVEEMKNCSFNTTTEIRDKEKKEYALFYKPDIVPLSETNNTSEYRLINCNTSACTQACPKVTFEPIPIHYCAPAGYAILKCNDETFNGTGPCSNVSTVQCTHGIRPVVSTQLLLNGSLAEKEIVIRSENLTNNAKIIIVHLHTPVEIVCTRPGNNTRKSVRIGPGQTFYATGDIIGDIKQAHCNISEEKWNDTLQKVGIELQKHFPNKTIKYNQSAGGDMEITTHSFNCGGEFFYCNTSNLFNGTYNGTYISTNSSANSTSTITLQCRIKQIINMWQGVGRCMYAPPIAGNITCRSNITGLLLTRDGGTNSNETETFRPAGGDMRDNWRSELYKYKVVKIEPLGVAPTRCKRRVVGRRRRRRAVGIGAVFLGFLGAAGSTMGAASMTLTVQARNLLSGIVQQQSNLLRAPEAQQHLLKLTVWGIKQLQARVLAVERYLRDQQLLGIWGCSGKLICCTNVPWNSSWSNRNLSEIWDNMTWLQWDKEISNYTQIIYGLLEESQNQQEKNEQDLLALD

SEQ ID NO: 53 - DNA, 1981 bp, synthetic construct
  source 1..1981: mol_type = other DNA
gtcgacaagcttcccgggccaccatgggctccctgcagcccctggccaccctgtacctgctgggcatgctggtggcctccgtgctggccgccgagaacctgtgggtgaccgtgtactacggcgtgcccgtgtggaaggaggccaagaccaccctgttctgcgcctccgacgcccgcgcctacgagaaggaggtgcacaacgtgtgggccacccacgcctgcgtgcccaccgacccctccccccaggagctggtgctgggcaacgtgaccgagaacttcaacatgtggaagaacgacatggtggaccagatgcacgaggacatcatctccctgtgggaccagtccctgaagccctgcgtgaagctgacccccctgtgcgtgaccctgatctgctccaacgccaccgtgaagaacggcaccgtggaggagatgaagaactgctccttcaacaccaccaccgagatccgcgacaaggagaagaaggagtacgccctgttctacaagcccgacatcgtgcccctgtccgagaccaacaacacctccgagtaccgcctgatcaactgcaacacctccgcctgcacccaggcctgccccaaggtgaccttcgagcccatccccatccactactgcgcccccgccggctacgccatcctgaagtgcaacgacgagaccttcaacggcaccggcccctgctccaacgtgtccaccgtgcagtgcacccacggcatccgccccgtggtgtccacccagctgctgctgaacggctccctggccgagaaggagatcgtgatccgctccgagaacctgaccaacaacgccaagatcatcatcgtgcacctgcacacccccgtggagatcgtgtgcacccgccccgccaacaacacccgcaagtccgtgcgcatcggccccggccagaccttctacgccaccggcgacatcatcggcgacatcaagcaggcccactgcaacatctccgaggagaagtggaacgacaccctgcagaaggtgggcatcgagctgcagaagcacttccccaacaagaccatcaagtacaaccagtccgccggcggcgacatggagatcaccacccactccttcaactgcggcggcgagttcttctactgcaacacctccaacctgttcaacggcacctacaacggcacctacatctccaccaactcctccgccaactccacctccaccatcaccctgcagtgccgcatcaagcagatcatcaacatgtggcagggcgtgggccgctgcatgtacgccccccccatcgccggcaacatcacctgccgctccaacatcaccggcctgctgctgacccgcgacggcggcaccaactccaacgagaccgagaccttccgccccgccggcggcgacatgcgcgacaactggcgctccgagctgtacaagtacaaggtggtgaagatcgagcccctgggcgtggcccccacccgctgcaagcgccgcgtggtgggccgccgccgccgccgccgcgccgtgggcatcggcgccgtgttcctgggcttcctgggcgccgccggctccaccatgggcgccgcctccatgaccctgaccgtgcaggcccgcaacctgctgtccggcatcgtgcagcagcagtccaacctgctgcgcgcccccgaggcccagcagcacctgctgaagctgaccgtgtggggcatcaagcagctgcaggcccgcgtgctggccgtggagcgctacctgcgcgaccagcagctgctgggcatctggggctgctccggcaagctgatctgctgcaccaacgtgccctggaactcctcctggtccaaccgcaacctgtccgagatctgggacaacatgacctggctgcagtgggacaaggagatctccaactacacccagatcatctacggcctgctggaggagtcccagaaccagcaggagaagaacgagcaggacctgctggccctggactgataagcggccgcggatcc

SEQ ID NO: 54 - protein, 646 aa, synthetic construct
MGSLQPLATLYLLGMLVASVLAAENLWVTVYYGVPVWKEAKTTLFCASDARAYEKEVHNVWATHACVPTDPSPQELVLGNVTENFNMWKNDMVDQMHEDIISLWDQSLKPCVKLTPLCVTLICSNATVKNGTVEEMKNCSFNTTTEIRDKEKKEYALFYKPDIVPLSETNNTSEYRLINCNTSACTQACPKVTFEPIPIHYCAPAGYAILKCNDETFNGTGPCSNVSTVQCTHGIRPVVSTQLLLNGSLAEKEIVIRSENLTNNAKIIIVHLHTPVEIVCTRPANNTRKSVRIGPGQTFYATGDIIGDIKQAHCNISEEKWNDTLQKVGIELQKHFPNKTIKYNQSAGGDMEITTHSFNCGGEFFYCNTSNLFNGTYNGTYISTNSSANSTSTITLQCRIKQIINMWQGVGRCMYAPPIAGNITCRSNITGLLLTRDGGTNSNETETFRPAGGDMRDNWRSELYKYKVVKIEPLGVAPTRCKRRVVGRRRRRRAVGIGAVFLGFLGAAGSTMGAASMTLTVQARNLLSGIVQQQSNLLRAPEAQQHLLKLTVWGIKQLQARVLAVERYLRDQQLLGIWGCSGKLICCTNVPWNSSWSNRNLSEIWDNMTWLQWDKEISNYTQIIYGLLEESQNQQEKNEQDLLALD

SEQ ID NO: 55 - DNA, 1981 bp, synthetic construct
  source 1..1981: mol_type = other DNA
gtcgacaagcttcccgggccaccatgggctccctgcagcccctggccaccctgtacctgctgggcatgctggtggcctccgtgctggccgccgagaacctgtgggtgaccgtgtactacggcgtgcccgtgtggaaggaggccaagaccaccctgttctgcgcctccgacgcccgcgcctacgagaaggaggtgcacaacgtgtgggccacccacgcctgcgtgcccaccgacccctccccccaggagctggtgctgggcaacgtgaccgagaacttcaacatgtggaagaacgacatggtggaccagatgcacgaggacatcatctccctgtgggaccagtccctgaagccctgcgtgaagctgacccccctgtgcgtgaccctgatctgctccaacgccaccgtgaagaacggcaccgtggaggagatgaagaactgctccttcaacaccaccaccgagatccgcgacaaggagaagaaggagtacgccctgttctacaagcccgacatcgtgcccctgtccgagaccaacaacacctccgagtaccgcctgatcaactgcaacacctccgcctgcacccaggcctgccccaaggtgaccttcgagcccatccccatccactactgcgcccccgccggctacgccatcctgaagtgcaacgacgagaccttcaacggcaccggcccctgctccaacgtgtccaccgtgcagtgcacccacggcatccgccccgtggtgtccacccagctgctgctgaacggctccctggccgagaaggagatcgtgatccgctccgagaacctgaccaacaacgccaagatcatcatcgtgcacctgcacaagcccgtgacgatcgtgtgcacccgccccgccaacaacacccgcaagtccgtgcgcatcggccccggccagaccttctacgccaccggcgacatcatcggcgacatcaagcaggcccactgcaacatctccgaggagaagtggaacgacaccctgcagaaggtgggcatcgagctgcagaagcacttccccaacaagaccatcaagtacaaccagtccgccggcggcgacatggagatcaccacccactccttcaactgcggcggcgagttcttctactgcaacacctccaacctgttcaacggcacctacaacggcacctacatctccaccaactcctccgccaagtccacctccaccatcaccctgcagtgccgcatcaagcagatcatcaacatgtggcagggcgtgggccgctgcatgtacgccccccccatcgccggcgccatcacctgccgctccaacatcaccggcctgctgctgacccgcgacggcggcaccaactccaacgagaccgagaccttccgccccgccggcggcgacatgcgcgacaactggcgctccgagctgtacaagtacaaggtggtgaagatcgagcccctgggcgtggcccccacccgctgcaagcgccgcgtggtgggccgccgccgccgccgccgcgccgtgggcatcggcgccgtgttcctgggcttcctgggcgccgccggctccaccatgggcgccgcctccatgaccctgaccgtgcaggcccgcaacctgctgtccggcatcgtgcagcagcagtccaacctgctgcgcgcccccgaggcccagcagcacctgctgaagctgaccgtgtggggcatcaagcagctgcaggcccgcgtgctggccgtggagcgctacctgcgcgaccagcagctgctgggcatctggggctgctccggcaagctgatctgctgcaccaacgtgccctggaactcctcctggtccaaccgcaacctgtccgagatctgggacaacatgacctggctgcagtgggacaaggagatctccaactacacccagatcatctacggcctgctggaggagtcccagaaccagcaggagaagaacgagcaggacctgctggccctggactgataagcggccgcggatcc

SEQ ID NO: 56 - protein, 646 aa, synthetic construct
MGSLQPLATLYLLGMLVASVLAAENLWVTVYYGVPVWKEAKTTLFCASDARAYEKEVHNVWATHACVPTDPSPQELVLGNVTENFNMWKNDMVDQMHEDIISLWDQSLKPCVKLTPLCVTLICSNATVKNGTVEEMKNCSFNTTTEIRDKEKKEYALFYKPDIVPLSETNNTSEYRLINCNTSACTQACPKVTFEPIPIHYCAPAGYAILKCNDETFNGTGPCSNVSTVQCTHGIRPVVSTQLLLNGSLAEKEIVIRSENLTNNAKIIIVHLHKPVTIVCTRPANNTRKSVRIGPGQTFYATGDIIGDIKQAHCNISEEKWNDTLQKVGIELQKHFPNKTIKYNQSAGGDMEITTHSFNCGGEFFYCNTSNLFNGTYNGTYISTNSSAKSTSTITLQCRIKQIINMWQGVGRCMYAPPIAGAITCRSNITGLLLTRDGGTNSNETETFRPAGGDMRDNWRSELYKYKVVKIEPLGVAPTRCKRRVVGRRRRRRAVGIGAVFLGFLGAAGSTMGAASMTLTVQARNLLSGIVQQQSNLLRAPEAQQHLLKLTVWGIKQLQARVLAVERYLRDQQLLGIWGCSGKLICCTNVPWNSSWSNRNLSEIWDNMTWLQWDKEISNYTQIIYGLLEESQNQQEKNEQDLLALD

SEQ ID NO: 57 - DNA, 1981 bp, synthetic construct
  source 1..1981: mol_type = other DNA
gtcgacaagcttcccgggccaccatgggctccctgcagcccctggccaccctgtacctgctgggcatgctggtggcctccgtgctggccgccgagaacctgtgggtgaccgtgtactacggcgtgcccgtgtggaaggaggccaagaccaccctgttctgcgcctccgacgcccgcgcctacgagaaggaggtgcacaacgtgtgggccacccacgcctgcgtgcccaccgacccctccccccaggagctggtgctgggcaacgtgaccgagaacttcaacatgtggaagaacgacatggtggaccagatgcacgaggacatcatctccctgtgggaccagtccctgaagccctgcgtgaagctgacccccctgtgcgtgaccctgatctgctccgacgccaccgtgaagaccggcaccgtggaggagatgaagaactgctccttcaacaccaccaccgagatccgcgacaaggagaagaaggagtacgccctgttctacaagcccgacatcgtgcccctgtccgagaccaacaacacctccgagtaccgcctgatcaactgcaacacctccgcctgcacccaggcctgccccaaggtgaccttcgagcccatccccatccactactgcgcccccgccggctacgccatcctgaagtgcaacgacgagaccttcaacggcaccggcccctgctccaacgtgtccaccgtgcagtgcacccacggcatccgccccgtggtgtccacccagctgctgctgaacggctccctggccgagaaggagatcgtgatccgctccgagaacctgaccaacaacgccaagatcatcatcgtgcacctgcacacccccgtggagatcgtgtgcacccgccccgccaacaacacccgcaagtccgtgcgcatcggccccggccagaccttctacgccaccggcgacatcatcggcgacatcaagcaggcccactgcaacatctccgaggagaagtggaacgacaccctgcagaaggtgggcatcgagctgcagaagcacttccccaacaagaccatcaagtacaaccagtccgccggcggcgacatggagatcaccacccactccttcaactgcggcggcgagttcttctactgcaacacctccaacctgttcaacggcacctacaacggcacctacatctccaccaactcctccgccaactccacctccaccatcaccctgcagtgccgcatcaagcagatcatcaacatgtggcagggcgtgggccgctgcatgtacgccccccccatcgccggcaacatcacctgccgctccaacatcaccggcctgctgctgacccgcgacggcggcaccaactccaacgagaccgagaccttccgccccgccggcggcgacatgcgcgacaactggcgctccgagctgtacaagtacaaggtggtgaagatcgagcccctgggcgtggcccccacccgctgcaagcgccgcgtggtgggccgccgccgccgccgccgcgccgtgggcatcggcgccgtgttcctgggcttcctgggcgccgccggctccaccatgggcgccgcctccatgaccctgaccgtgcaggcccgcaacctgctgtccggcatcgtgcagcagcagtccaacctgctgcgcgcccccgaggcccagcagcacctgctgaagctgaccgtgtggggcatcaagcagctgcaggcccgcgtgctggccgtggagcgctacctgcgcgaccagcagctgctgggcatctggggctgctccggcaagctgatctgctgcaccaacgtgccctggaactcctcctggtccaaccgcaacctgtccgagatctgggacaacatgacctggctgcagtgggacaaggagatctccaactacacccagatcatctacggcctgctggaggagtcccagaaccagcaggagaagaacgagcaggacctgctggccctggactgataagcggccgcggatcc

SEQ ID NO: 58 - protein, 646 aa, synthetic construct
MGSLQPLATLYLLGMLVASVLAAENLWVTVYYGVPVWKEAKTTLFCASDARAYEKEVHNVWATHACVPTDPSPQELVLGNVTENFNMWKNDMVDQMHEDIISLWDQSLKPCVKLTPLCVTLICSDATVKTGTVEEMKNCSFNTTTEIRDKEKKEYALFYKPDIVPLSETNNTSEYRLINCNTSACTQACPKVTFEPIPIHYCAPAGYAILKCNDETFNGTGPCSNVSTVQCTHGIRPVVSTQLLLNGSLAEKEIVIRSENLTNNAKIIIVHLHTPVEIVCTRPANNTRKSVRIGPGQTFYATGDIIGDIKQAHCNISEEKWNDTLQKVGIELQKHFPNKTIKYNQSAGGDMEITTHSFNCGGEFFYCNTSNLFNGTYNGTYISTNSSANSTSTITLQCRIKQIINMWQGVGRCMYAPPIAGNITCRSNITGLLLTRDGGTNSNETETFRPAGGDMRDNWRSELYKYKVVKIEPLGVAPTRCKRRVVGRRRRRRAVGIGAVFLGFLGAAGSTMGAASMTLTVQARNLLSGIVQQQSNLLRAPEAQQHLLKLTVWGIKQLQARVLAVERYLRDQQLLGIWGCSGKLICCTNVPWNSSWSNRNLSEIWDNMTWLQWDKEISNYTQIIYGLLEESQNQQEKNEQDLLALD

SEQ ID NO: 59 - DNA, 1981 bp, synthetic construct
  source 1..1981: mol_type = other DNA
gtcgacaagcttcccgggccaccatgggctccctgcagcccctggccaccctgtacctgctgggcatgctggtggcctccgtgctggccgccgagaacctgtgggtgaccgtgtactacggcgtgcccgtgtggaaggaggccaagaccaccctgttctgcgcctccgacgcccgcgcctacgagaaggaggtgcacaacgtgtgggccacccacgcctgcgtgcccaccgacccctccccccaggagctggtgctgggcaacgtgaccgagaacttcaacatgtggaagaacgacatggtggaccagatgcacgaggacatcatctccctgtgggaccagtccctgaagccctgcgtgaagctgacccccctgtgcgtgaccctgatctgctccaacgccaccgtgaagaacggcaccgtggaggagatgaagaactgctccttcaacaccaccaccgagatccgcgacaaggagaagaaggagtacgccctgttctacaagcccgacatcgtgcccctgtccgagaccaacaacacctccgagtaccgcctgatcaactgcaacacctccgcctgcacccaggcctgccccaaggtgaccttcgagcccatccccatccactactgcgcccccgccggctacgccatcctgaagtgcaacgacgagaccttcaacggcaccggcccctgctccaacgtgtccaccgtgcagtgcacccacggcatccgccccgtggtgtccacccagctgctgctgaacggctccctggccgagaaggagatcgtgatccgctccgagaacctgaccaacaacgccaagatcatcatcgtgcacctgcacacccccgtggagatcgtgtgcacccgcccccgcaacaacacccgcaagtccgtgcgcatcggccccggccagaccttctacgccaccggcgacatcatcggcgacatcaagcaggcccactgcaacatctccgaggagaagtggaacgacaccctgcagaaggtgggcatcgagctgcagaagcacttccccaacaagaccatcaagtacaaccagtccgccggcggcgacatggagatcaccacccactccttcaactgcggcggcgagttcttctactgcaacacctccaacctgttcaacggcacctacaacggcacctacatctccaccaactcctccgccaactccacctccaccatcaccctgcagtgccgcatcaagcagatcatcaacatgtggcagggcgtgggccgctgcatgtacgccccccccatcgccggcaacatcacctgccgctccaacatcaccggcctgctgctgacccgcgacggcggcaccaactccaacgagaccgagaccttccgccccgccggcggcgacatgcgcgacaactggcgctccgagctgtacaagtacaaggtggtgaagatcgagcccctgggcgtggcccccacccgctgcaagcgccgcgtggtgggccgccgccgccgccgccgcgccgtgggcatcggcgccgtgttcctgggcttcctgggcgccgccggctccaccatgggcgccgcctccatgaccctgaccgtgcaggcccgcaacctgctgtccggcatcgtgcagcagcagtccaacctgctgcgcgcccccgaggcccagcagcacctgctgaagctgaccgtgtggggcatcaagcagctgcaggcccgcgtgctggccgtggagcgctacctgcgcgaccagcagctgctgggcatctggggctgctccggcaagctgatctgctgcaccaacgtgccctggaactcctcctggtccaaccgcaacctgtccgagatctgggacaacatgacctggctgcagtgggacaaggagatctccaactacacccagatcatctacggcctgctggaggagtcccagaaccagcaggagaagaacgagcaggacctgctggccctggactgataagcggccgcggatcc

SEQ ID NO: 60 - protein, 646 aa, synthetic construct
MGSLQPLATLYLLGMLVASVLAAENLWVTVYYGVPVWKEAKTTLFCASDARAYEKEVHNVWATHACVPTDPSPQELVLGNVTENFNMWKNDMVDQMHEDIISLWDQSLKPCVKLTPLCVTLICSNATVKNGTVEEMKNCSFNTTTEIRDKEKKEYALFYKPDIVPLSETNNTSEYRLINCNTSACTQACPKVTFEPIPIHYCAPAGYAILKCNDETFNGTGPCSNVSTVQCTHGIRPVVSTQLLLNGSLAEKEIVIRSENLTNNAKIIIVHLHTPVEIVCTRPRNNTRKSVRIGPGQTFYATGDIIGDIKQAHCNISEEKWNDTLQKVGIELQKHFPNKTIKYNQSAGGDMEITTHSFNCGGEFFYCNTSNLFNGTYNGTYISTNSSANSTSTITLQCRIKQIINMWQGVGRCMYAPPIAGNITCRSNITGLLLTRDGGTNSNETETFRPAGGDMRDNWRSELYKYKVVKIEPLGVAPTRCKRRVVGRRRRRRAVGIGAVFLGFLGAAGSTMGAASMTLTVQARNLLSGIVQQQSNLLRAPEAQQHLLKLTVWGIKQLQARVLAVERYLRDQQLLGIWGCSGKLICCTNVPWNSSWSNRNLSEIWDNMTWLQWDKEISNYTQIIYGLLEESQNQQEKNEQDLLALD

SEQ ID NO: 61 - DNA, 1981 bp, synthetic construct
  source 1..1981: mol_type = other DNA
gtcgacaagcttcccgggccaccatgggctccctgcagcccctggccaccctgtacctgctgggcatgctggtggcctccgtgctggccgccgagaacctgtgggtgaccgtgtactacggcgtgcccgtgtggaaggaggccaagaccaccctgttctgcgcctccgacgcccgcgcctacgagaaggaggtgcacaacgtgtgggccacccacgcctgcgtgcccaccgacccctccccccaggagctggtgctgggcaacgtgaccgagaacttcaacatgtggaagaacgacatggtggaccagatgcacgaggacatcatctccctgtgggaccagtccctgaagccctgcgtgaagctgacccccctgtgcgtgaccctgatctgctccaacgccaccgtgaagaacggcaccgtggaggagatgaagaactgctccttcaacaccaccaccgagatccgcgacaaggagaagaaggagtacgccctgttctacaagcccgacatcgtgcccctgtccgagaccaacaacacctccgagtaccgcctgatcaactgcaacacctccgcctgcacccaggcctgccccaaggtgaccttcgagcccatccccatccactactgcgcccccgccggctacgccatcctgaagtgcaacgacgagaccttcaacggcaccggcccctgctccaacgtgtccaccgtgcagtgcacccacggcatccgccccgtggtgtccacccagctgctgctgaacggctccctggccgagaaggagatcgtgatccgctccgagaacctgaccaacaacgccaagatcatcatcgtgcacctgcacaagcccgtgacgatcgtgtgcacccgcccccgcaacaacacccgcaagtccgtgcgcatcggccccggccagaccttctacgccaccggcgacatcatcggcgacatcaagcaggcccactgcaacatctccgaggagaagtggaacgacaccctgcagaaggtgggcatcgagctgcagaagcacttccccaacaagaccatcaagtacaaccagtccgccggcggcgacatggagatcaccacccactccttcaactgcggcggcgagttcttctactgcaacacctccaacctgttcaacggcacctacaacggcacctacatctccaccaactcctccgccaagtccacctccaccatcaccctgcagtgccgcatcaagcagatcatcaacatgtggcagggcgtgggccgctgcatgtacgccccccccatcgccggcgccatcacctgccgctccaacatcaccggcctgctgctgacccgcgacggcggcaccaactccaacgagaccgagaccttccgccccgccggcggcgacatgcgcgacaactggcgctccgagctgtacaagtacaaggtggtgaagatcgagcccctgggcgtggcccccacccgctgcaagcgccgcgtggtgggccgccgccgccgccgccgcgccgtgggcatcggcgccgtgttcctgggcttcctgggcgccgccggctccaccatgggcgccgcctccatgaccctgaccgtgcaggcccgcaacctgctgtccggcatcgtgcagcagcagtccaacctgctgcgcgcccccgaggcccagcagcacctgctgaagctgaccgtgtggggcatcaagcagctgcaggcccgcgtgctggccgtggagcgctacctgcgcgaccagcagctgctgggcatctggggctgctccggcaagctgatctgctgcaccaacgtgccctggaactcctcctggtccaaccgcaacctgtccgagatctgggacaacatgacctggctgcagtgggacaaggagatctccaactacacccagatcatctacggcctgctggaggagtcccagaaccagcaggagaagaacgagcaggacctgctggccctggactgataagcggccgcggatcc

SEQ ID NO: 62 - protein, 646 aa, synthetic construct
MGSLQPLATLYLLGMLVASVLAAENLWVTVYYGVPVWKEAKTTLFCASDARAYEKEVHNVWATHACVPTDPSPQELVLGNVTENFNMWKNDMVDQMHEDIISLWDQSLKPCVKLTPLCVTLICSNATVKNGTVEEMKNCSFNTTTEIRDKEKKEYALFYKPDIVPLSETNNTSEYRLINCNTSACTQACPKVTFEPIPIHYCAPAGYAILKCNDETFNGTGPCSNVSTVQCTHGIRPVVSTQLLLNGSLAEKEIVIRSENLTNNAKIIIVHLHKPVTIVCTRPRNNTRKSVRIGPGQTFYATGDIIGDIKQAHCNISEEKWNDTLQKVGIELQKHFPNKTIKYNQSAGGDMEITTHSFNCGGEFFYCNTSNLFNGTYNGTYISTNSSAKSTSTITLQCRIKQIINMWQGVGRCMYAPPIAGAITCRSNITGLLLTRDGGTNSNETETFRPAGGDMRDNWRSELYKYKVVKIEPLGVAPTRCKRRVVGRRRRRRAVGIGAVFLGFLGAAGSTMGAASMTLTVQARNLLSGIVQQQSNLLRAPEAQQHLLKLTVWGIKQLQARVLAVERYLRDQQLLGIWGCSGKLICCTNVPWNSSWSNRNLSEIWDNMTWLQWDKEISNYTQIIYGLLEESQNQQEKNEQDLLALD

SEQ ID NO: 63 - DNA, 1981 bp, synthetic construct
  source 1..1981: mol_type = other DNA
gtcgacaagcttcccgggccaccatgggctccctgcagcccctggccaccctgtacctgctgggcatgctggtggcctccgtgctggccgccgagaacctgtgggtgaccgtgtactacggcgtgcccgtgtggaaggaggccaagaccaccctgttctgcgcctccgacgcccgcgcctacgagaaggaggtgcacaacgtgtgggccacccacgcctgcgtgcccaccgacccctccccccaggagctggtgctgggcaacgtgaccgagaacttcaacatgtggaagaacgacatggtggaccagatgcacgaggacatcatctccctgtgggaccagtccctgaagccctgcgtgaagctgacccccctgtgcgtgaccctgatctgctccgacgccaccgtgaagaccggcaccgtggaggagatgaagaactgctccttcaacaccaccaccgagatccgcgacaaggagaagaaggagtacgccctgttctacaagcccgacatcgtgcccctgtccgagaccaacaacacctccgagtaccgcctgatcaactgcaacacctccgcctgcacccaggcctgccccaaggtgaccttcgagcccatccccatccactactgcgcccccgccggctacgccatcctgaagtgcaacgacgagaccttcaacggcaccggcccctgctccaacgtgtccaccgtgcagtgcacccacggcatccgccccgtggtgtccacccagctgctgctgaacggctccctggccgagaaggagatcgtgatccgctccgagaacctgaccaacaacgccaagatcatcatcgtgcacctgcacacccccgtggagatcgtgtgcacccgcccccgcaacaacacccgcaagtccgtgcgcatcggccccggccagaccttctacgccaccggcgacatcatcggcgacatcaagcaggcccactgcaacatctccgaggagaagtggaacgacaccctgcagaaggtgggcatcgagctgcagaagcacttccccaacaagaccatcaagtacaaccagtccgccggcggcgacatggagatcaccacccactccttcaactgcggcggcgagttcttctactgcaacacctccaacctgttcaacggcacctacaacggcacctacatctccaccaactcctccgccaactccacctccaccatcaccctgcagtgccgcatcaagcagatcatcaacatgtggcagggcgtgggccgctgcatgtacgccccccccatcgccggcaacatcacctgccgctccaacatcaccggcctgctgctgacccgcgacggcggcaccaactccaacgagaccgagaccttccgccccgccggcggcgacatgcgcgacaactggcgctccgagctgtacaagtacaaggtggtgaagatcgagcccctgggcgtggcccccacccgctgcaagcgccgcgtggtgggccgccgccgccgccgccgcgccgtgggcatcggcgccgtgttcctgggcttcctgggcgccgccggctccaccatgggcgccgcctccatgaccctgaccgtgcaggcccgcaacctgctgtccggcatcgtgcagcagcagtccaacctgctgcgcgcccccgaggcccagcagcacctgctgaagctgaccgtgtggggcatcaagcagctgcaggcccgcgtgctggccgtggagcgctacctgcgcgaccagcagctgctgggcatctggggctgctccggcaagctgatctgctgcaccaacgtgccctggaactcctcctggtccaaccgcaacctgtccgagatctgggacaacatgacctggctgcagtgggacaaggagatctccaactacacccagatcatctacggcctgctggaggagtcccagaaccagcaggagaagaacgagcaggacctgctggccctggactgataagcggccgcggatcc

SEQ ID NO: 64 - protein, 646 aa, synthetic construct
MGSLQPLATLYLLGMLVASVLAAENLWVTVYYGVPVWKEAKTTLFCASDARAYEKEVHNVWATHACVPTDPSPQELVLGNVTENFNMWKNDMVDQMHEDIISLWDQSLKPCVKLTPLCVTLICSDATVKTGTVEEMKNCSFNTTTEIRDKEKKEYALFYKPDIVPLSETNNTSEYRLINCNTSACTQACPKVTFEPIPIHYCAPAGYAILKCNDETFNGTGPCSNVSTVQCTHGIRPVVSTQLLLNGSLAEKEIVIRSENLTNNAKIIIVHLHTPVEIVCTRPRNNTRKSVRIGPGQTFYATGDIIGDIKQAHCNISEEKWNDTLQKVGIELQKHFPNKTIKYNQSAGGDMEITTHSFNCGGEFFYCNTSNLFNGTYNGTYISTNSSANSTSTITLQCRIKQIINMWQGVGRCMYAPPIAGNITCRSNITGLLLTRDGGTNSNETETFRPAGGDMRDNWRSELYKYKVVKIEPLGVAPTRCKRRVVGRRRRRRAVGIGAVFLGFLGAAGSTMGAASMTLTVQARNLLSGIVQQQSNLLRAPEAQQHLLKLTVWGIKQLQARVLAVERYLRDQQLLGIWGCSGKLICCTNVPWNSSWSNRNLSEIWDNMTWLQWDKEISNYTQIIYGLLEESQNQQEKNEQDLLALD

SEQ ID NO: 65 - DNA, 1981 bp, synthetic construct
  source 1..1981: mol_type = other DNA
gtcgacaagcttcccgggccaccatgggctccctgcagcccctggccaccctgtacctgctgggcatgctggtggcctccgtgctggccgccgagaacctgtgggtgaccgtgtactacggcgtgcccgtgtggaaggaggccaagaccaccctgttctgcgcctccgacgcccgcgcctacgagaaggaggtgcacaacgtgtgggccacccacgcctgcgtgcccaccgacccctccccccaggagctggtgctgggcaacgtgaccgagaacttcaacatgtggaagaacgacatggtggaccagatgcacgaggacatcatctccctgtgggaccagtccctgaagccctgcgtgaagctgacccccctgtgcgtgaccctgatctgctccaacgccaccgtgaagaacggcaccgtggaggagatgaagaactgctccttcaacaccaccaccgagatccgcgacaaggagaagaaggagtacgccctgttctacaagcccgacatcgtgcccctgtccgagaccaacaacacctccgagtaccgcctgatcaactgcaacacctccgcctgcacccaggcctgccccaaggtgaccttcgagcccatccccatccactactgcgcccccgccggctacgccatcctgaagtgcaacgacgagaccttcaacggcaccggcccctgctccaacgtgtccaccgtgcagtgcacccacggcatccgccccgtggtgtccacccagctgctgctgaacggctccctggccgagaaggagatcgtgatccgctccgagaacctgaccaacaacgccaagatcatcatcgtgcacctgcacacccccgtggagatcgtgtgcacccgccccaagaacaacacccgcaagtccgtgcgcatcggccccggccagaccttctacgccaccggcgacatcatcggcgacatcaagcaggcccactgcaacatctccgaggagaagtggaacgacaccctgcagaaggtgggcatcgagctgcagaagcacttccccaacaagaccatcaagtacaaccagtccgccggcggcgacatggagatcaccacccactccttcaactgcggcggcgagttcttctactgcaacacctccaacctgttcaacggcacctacaacggcacctacatctccaccaactcctccgccaactccacctccaccatcaccctgcagtgccgcatcaagcagatcatcaacatgtggcagggcgtgggccgctgcatgtacgccccccccatcgccggcaacatcacctgccgctccaacatcaccggcctgctgctgacccgcgacggcggcaccaactccaacgagaccgagaccttccgccccgccggcggcgacatgcgcgacaactggcgctccgagctgtacaagtacaaggtggtgaagatcgagcccctgggcgtggcccccacccgctgcaagcgccgcgtggtgggccgccgccgccgccgccgcgccgtgggcatcggcgccgtgttcctgggcttcctgggcgccgccggctccaccatgggcgccgcctccatgaccctgaccgtgcaggcccgcaacctgctgtccggcatcgtgcagcagcagtccaacctgctgcgcgcccccgaggcccagcagcacctgctgaagctgaccgtgtggggcatcaagcagctgcaggcccgcgtgctggccgtggagcgctacctgcgcgaccagcagctgctgggcatctggggctgctccggcaagctgatctgctgcaccaacgtgccctggaactcctcctggtccaaccgcaacctgtccgagatctgggacaacatgacctggctgcagtgggacaaggagatctccaactacacccagatcatctacggcctgctggaggagtcccagaaccagcaggagaagaacgagcaggacctgctggccctggactgataagcggccgcggatcc

SEQ ID NO: 66 - protein, 646 aa, synthetic construct
MGSLQPLATLYLLGMLVASVLAAENLWVTVYYGVPVWKEAKTTLFCASDARAYEKEVHNVWATHACVPTDPSPQELVLGNVTENFNMWKNDMVDQMHEDIISLWDQSLKPCVKLTPLCVTLICSNATVKNGTVEEMKNCSFNTTTEIRDKEKKEYALFYKPDIVPLSETNNTSEYRLINCNTSACTQACPKVTFEPIPIHYCAPAGYAILKCNDETFNGTGPCSNVSTVQCTHGIRPVVSTQLLLNGSLAEKEIVIRSENLTNNAKIIIVHLHTPVEIVCTRPKNNTRKSVRIGPGQTFYATGDIIGDIKQAHCNISEEKWNDTLQKVGIELQKHFPNKTIKYNQSAGGDMEITTHSFNCGGEFFYCNTSNLFNGTYNGTYISTNSSANSTSTITLQCRIKQIINMWQGVGRCMYAPPIAGNITCRSNITGLLLTRDGGTNSNETETFRPAGGDMRDNWRSELYKYKVVKIEPLGVAPTRCKRRVVGRRRRRRAVGIGAVFLGFLGAAGSTMGAASMTLTVQARNLLSGIVQQQSNLLRAPEAQQHLLKLTVWGIKQLQARVLAVERYLRDQQLLGIWGCSGKLICCTNVPWNSSWSNRNLSEIWDNMTWLQWDKEISNYTQIIYGLLEESQNQQEKNEQDLLALD

SEQ ID NO: 67 - DNA, 1981 bp, synthetic construct
  source 1..1981: mol_type = other DNA
gtcgacaagcttcccgggccaccatgggctccctgcagcccctggccaccctgtacctgctgggcatgctggtggcctccgtgctggccgccgagaacctgtgggtgaccgtgtactacggcgtgcccgtgtggaaggaggccaagaccaccctgttctgcgcctccgacgcccgcgcctacgagaaggaggtgcacaacgtgtgggccacccacgcctgcgtgcccaccgacccctccccccaggagctggtgctgggcaacgtgaccgagaacttcaacatgtggaagaacgacatggtggaccagatgcacgaggacatcatctccctgtgggaccagtccctgaagccctgcgtgaagctgacccccctgtgcgtgaccctgatctgctccaacgccaccgtgaagaacggcaccgtggaggagatgaagaactgctccttcaacaccaccaccgagatccgcgacaaggagaagaaggagtacgccctgttctacaagcccgacatcgtgcccctgtccgagaccaacaacacctccgagtaccgcctgatcaactgcaacacctccgcctgcacccaggcctgccccaaggtgaccttcgagcccatccccatccactactgcgcccccgccggctacgccatcctgaagtgcaacgacgagaccttcaacggcaccggcccctgctccaacgtgtccaccgtgcagtgcacccacggcatccgccccgtggtgtccacccagctgctgctgaacggctccctggccgagaaggagatcgtgatccgctccgagaacctgaccaacaacgccaagatcatcatcgtgcacctgcacaagcccgtgacgatcgtgtgcacccgccccaagaacaacacccgcaagtccgtgcgcatcggccccggccagaccttctacgccaccggcgacatcatcggcgacatcaagcaggcccactgcaacatctccgaggagaagtggaacgacaccctgcagaaggtgggcatcgagctgcagaagcacttccccaacaagaccatcaagtacaaccagtccgccggcggcgacatggagatcaccacccactccttcaactgcggcggcgagttcttctactgcaacacctccaacctgttcaacggcacctacaacggcacctacatctccaccaactcctccgccaagtccacctccaccatcaccctgcagtgccgcatcaagcagatcatcaacatgtggcagggcgtgggccgctgcatgtacgccccccccatcgccggcgccatcacctgccgctccaacatcaccggcctgctgctgacccgcgacggcggcaccaactccaacgagaccgagaccttccgccccgccggcggcgacatgcgcgacaactggcgctccgagctgtacaagtacaaggtggtgaagatcgagcccctgggcgtggcccccacccgctgcaagcgccgcgtggtgggccgccgccgccgccgccgcgccgtgggcatcggcgccgtgttcctgggcttcctgggcgccgccggctccaccatgggcgccgcctccatgaccctgaccgtgcaggcccgcaacctgctgtccggcatcgtgcagcagcagtccaacctgctgcgcgcccccgaggcccagcagcacctgctgaagctgaccgtgtggggcatcaagcagctgcaggcccgcgtgctggccgtggagcgctacctgcgcgaccagcagctgctgggcatctggggctgctccggcaagctgatctgctgcaccaacgtgccctggaactcctcctggtccaaccgcaacctgtccgagatctgggacaacatgacctggctgcagtgggacaaggagatctccaactacacccagatcatctacggcctgctggaggagtcccagaaccagcaggagaagaacgagcaggacctgctggccctggactgataagcggccgcggatcc

SEQ ID NO: 68 - protein, 646 aa, synthetic construct
MGSLQPLATLYLLGMLVASVLAAENLWVTVYYGVPVWKEAKTTLFCASDARAYEKEVHNVWATHACVPTDPSPQELVLGNVTENFNMWKNDMVDQMHEDIISLWDQSLKPCVKLTPLCVTLICSNATVKNGTVEEMKNCSFNTTTEIRDKEKKEYALFYKPDIVPLSETNNTSEYRLINCNTSACTQACPKVTFEPIPIHYCAPAGYAILKCNDETFNGTGPCSNVSTVQCTHGIRPVVSTQLLLNGSLAEKEIVIRSENLTNNAKIIIVHLHKPVTIVCTRPKNNTRKSVRIGPGQTFYATGDIIGDIKQAHCNISEEKWNDTLQKVGIELQKHFPNKTIKYNQSAGGDMEITTHSFNCGGEFFYCNTSNLFNGTYNGTYISTNSSAKSTSTITLQCRIKQIINMWQGVGRCMYAPPIAGAITCRSNITGLLLTRDGGTNSNETETFRPAGGDMRDNWRSELYKYKVVKIEPLGVAPTRCKRRVVGRRRRRRAVGIGAVFLGFLGAAGSTMGAASMTLTVQARNLLSGIVQQQSNLLRAPEAQQHLLKLTVWGIKQLQARVLAVERYLRDQQLLGIWGCSGKLICCTNVPWNSSWSNRNLSEIWDNMTWLQWDKEISNYTQIIYGLLEESQNQQEKNEQDLLALD

SEQ ID NO: 69 - DNA, 1981 bp, synthetic construct
  source 1..1981: mol_type = other DNA
gtcgacaagcttcccgggccaccatgggctccctgcagcccctggccaccctgtacctgctgggcatgctggtggcctccgtgctggccgccgagaacctgtgggtgaccgtgtactacggcgtgcccgtgtggaaggaggccaagaccaccctgttctgcgcctccgacgcccgcgcctacgagaaggaggtgcacaacgtgtgggccacccacgcctgcgtgcccaccgacccctccccccaggagctggtgctgggcaacgtgaccgagaacttcaacatgtggaagaacgacatggtggaccagatgcacgaggacatcatctccctgtgggaccagtccctgaagccctgcgtgaagctgacccccctgtgcgtgaccctgatctgctccgacgccaccgtgaagaccggcaccgtggaggagatgaagaactgctccttcaacaccaccaccgagatccgcgacaaggagaagaaggagtacgccctgttctacaagcccgacatcgtgcccctgtccgagaccaacaacacctccgagtaccgcctgatcaactgcaacacctccgcctgcacccaggcctgccccaaggtgaccttcgagcccatccccatccactactgcgcccccgccggctacgccatcctgaagtgcaacgacgagaccttcaacggcaccggcccctgctccaacgtgtccaccgtgcagtgcacccacggcatccgccccgtggtgtccacccagctgctgctgaacggctccctggccgagaaggagatcgtgatccgctccgagaacctgaccaacaacgccaagatcatcatcgtgcacctgcacacccccgtggagatcgtgtgcacccgccccaagaacaacacccgcaagtccgtgcgcatcggccccggccagaccttctacgccaccggcgacatcatcggcgacatcaagcaggcccactgcaacatctccgaggagaagtggaacgacaccctgcagaaggtgggcatcgagctgcagaagcacttccccaacaagaccatcaagtacaaccagtccgccggcggcgacatggagatcaccacccactccttcaactgcggcggcgagttcttctactgcaacacctccaacctgttcaacggcacctacaacggcacctacatctccaccaactcctccgccaactccacctccaccatcaccctgcagtgccgcatcaagcagatcatcaacatgtggcagggcgtgggccgctgcatgtacgccccccccatcgccggcaacatcacctgccgctccaacatcaccggcctgctgctgacccgcgacggcggcaccaactccaacgagaccgagaccttccgccccgccggcggcgacatgcgcgacaactggcgctccgagctgtacaagtacaaggtggtgaagatcgagcccctgggcgtggcccccacccgctgcaagcgccgcgtggtgggccgccgccgccgccgccgcgccgtgggcatcggcgccgtgttcctgggcttcctgggcgccgccggctccaccatgggcgccgcctccatgaccctgaccgtgcaggcccgcaacctgctgtccggcatcgtgcagcagcagtccaacctgctgcgcgcccccgaggcccagcagcacctgctgaagctgaccgtgtggggcatcaagcagctgcaggcccgcgtgctggccgtggagcgctacctgcgcgaccagcagctgctgggcatctggggctgctccggcaagctgatctgctgcaccaacgtgccctggaactcctcctggtccaaccgcaacctgtccgagatctgggacaacatgacctggctgcagtgggacaaggagatctccaactacacccagatcatctacggcctgctggaggagtcccagaaccagcaggagaagaacgagcaggacctgctggccctggactgataagcggccgcggatcc

SEQ ID NO: 70 - protein, 646 aa, synthetic construct
MGSLQPLATLYLLGMLVASVLAAENLWVTVYYGVPVWKEAKTTLFCASDARAYEKEVHNVWATHACVPTDPSPQELVLGNVTENFNMWKNDMVDQMHEDIISLWDQSLKPCVKLTPLCVTLICSDATVKTGTVEEMKNCSFNTTTEIRDKEKKEYALFYKPDIVPLSETNNTSEYRLINCNTSACTQACPKVTFEPIPIHYCAPAGYAILKCNDETFNGTGPCSNVSTVQCTHGIRPVVSTQLLLNGSLAEKEIVIRSENLTNNAKIIIVHLHTPVEIVCTRPKNNTRKSVRIGPGQTFYATGDIIGDIKQAHCNISEEKWNDTLQKVGIELQKHFPNKTIKYNQSAGGDMEITTHSFNCGGEFFYCNTSNLFNGTYNGTYISTNSSANSTSTITLQCRIKQIINMWQGVGRCMYAPPIAGNITCRSNITGLLLTRDGGTNSNETETFRPAGGDMRDNWRSELYKYKVVKIEPLGVAPTRCKRRVVGRRRRRRAVGIGAVFLGFLGAAGSTMGAASMTLTVQARNLLSGIVQQQSNLLRAPEAQQHLLKLTVWGIKQLQARVLAVERYLRDQQLLGIWGCSGKLICCTNVPWNSSWSNRNLSEIWDNMTWLQWDKEISNYTQIIYGLLEESQNQQEKNEQDLLALD

SEQ ID NO: 71 - DNA, 1981 bp, synthetic construct
  source 1..1981: mol_type = other DNA
gtcgacaagcttcccgggccaccatgggctccctgcagcccctggccaccctgtacctgctgggcatgctggtggcctccgtgctggccgccgagaacctgtgggtgaccgtgtactacggcgtgcccgtgtggaaggaggccaagaccaccctgttctgcgcctccgacgcccgcgcctacgagaaggaggtgcacaacgtgtgggccacccacgcctgcgtgcccaccgacccctccccccaggagctggtgctgggcaacgtgaccgagaacttcaacatgtggaagaacgacatggtggaccagatgcacgaggacatcatctccctgtgggaccagtccctgaagccctgcgtgaagctgacccccctgtgcgtgaccctgatctgctccaacgccaccgtgaagaacggcaccgtggaggagatgaagaactgctccttcaacaccaccaccgagatccgcgacaaggagaagaaggagtacgccctgttctacaagcccgacatcgtgcccctgtccgagaccaacaacacctccgagtaccgcctgatcaactgcaacacctccgcctgcacccaggcctgccccaaggtgaccttcgagcccatccccatccactactgcgcccccgccggctacgccatcctgaagtgcaacgacgagaccttcaacggcaccggcccctgctccaacgtgtccaccgtgcagtgcacccacggcatccgccccgtggtgtccacccagctgctgctgaacggctccctggccgagaaggagatcgtgatccgctccgagaacctgaccaacaacgccaagatcatcatcgtgcacctgcacacccccgtggagatcgtgtgcacccgccccgacaacaacacccgcaagtccgtgcgcatcggccccggccagaccttctacgccaccggcgacatcatcggcgacatcaagcaggcccactgcaacatctccgaggagaagtggaacgacaccctgcagaaggtgggcatcgagctgcagaagcacttccccaacaagaccatcaagtacaaccagtccgccggcggcgacatggagatcaccacccactccttcaactgcggcggcgagttcttctactgcaacacctccaacctgttcaacggcacctacaacggcacctacatctccaccaactcctccgccaactccacctccaccatcaccctgcagtgccgcatcaagcagatcatcaacatgtggcagggcgtgggccgctgcatgtacgccccccccatcgccggcaacatcacctgccgctccaacatcaccggcctgctgctgacccgcgacggcggcaccaactccaacgagaccgagaccttccgccccgccggcggcgacatgcgcgacaactggcgctccgagctgtacaagtacaaggtggtgaagatcgagcccctgggcgtggcccccacccgctgcaagcgccgcgtggtgggccgccgccgccgccgccgcgccgtgggcatcggcgccgtgttcctgggcttcctgggcgccgccggctccaccatgggcgccgcctccatgaccctgaccgtgcaggcccgcaacctgctgtccggcatcgtgcagcagcagtccaacctgctgcgcgcccccgaggcccagcagcacctgctgaagctgaccgtgtggggcatcaagcagctgcaggcccgcgtgctggccgtggagcgctacctgcgcgaccagcagctgctgggcatctggggctgctccggcaagctgatctgctgcaccaacgtgccctggaactcctcctggtccaaccgcaacctgtccgagatctgggacaacatgacctggctgcagtgggacaaggagatctccaactacacccagatcatctacggcctgctggaggagtcccagaaccagcaggagaagaacgagcaggacctgctggccctggactgataagcggccgcggatcc

SEQ ID NO: 72 - protein, 646 aa, synthetic construct
MGSLQPLATLYLLGMLVASVLAAENLWVTVYYGVPVWKEAKTTLFCASDARAYEKEVHNVWATHACVPTDPSPQELVLGNVTENFNMWKNDMVDQMHEDIISLWDQSLKPCVKLTPLCVTLICSNATVKNGTVEEMKNCSFNTTTEIRDKEKKEYALFYKPDIVPLSETNNTSEYRLINCNTSACTQACPKVTFEPIPIHYCAPAGYAILKCNDETFNGTGPCSNVSTVQCTHGIRPVVSTQLLLNGSLAEKEIVIRSENLTNNAKIIIVHLHTPVEIVCTRPDNNTRKSVRIGPGQTFYATGDIIGDIKQAHCNISEEKWNDTLQKVGIELQKHFPNKTIKYNQSAGGDMEITTHSFNCGGEFFYCNTSNLFNGTYNGTYISTNSSANSTSTITLQCRIKQIINMWQGVGRCMYAPPIAGNITCRSNITGLLLTRDGGTNSNETETFRPAGGDMRDNWRSELYKYKVVKIEPLGVAPTRCKRRVVGRRRRRRAVGIGAVFLGFLGAAGSTMGAASMTLTVQARNLLSGIVQQQSNLLRAPEAQQHLLKLTVWGIKQLQARVLAVERYLRDQQLLGIWGCSGKLICCTNVPWNSSWSNRNLSEIWDNMTWLQWDKEISNYTQIIYGLLEESQNQQEKNEQDLLALD

SEQ ID NO: 73 - DNA, 1981 bp, synthetic construct
  source 1..1981: mol_type = other DNA
gtcgacaagcttcccgggccaccatgggctccctgcagcccctggccaccctgtacctgctgggcatgctggtggcctccgtgctggccgccgagaacctgtgggtgaccgtgtactacggcgtgcccgtgtggaaggaggccaagaccaccctgttctgcgcctccgacgcccgcgcctacgagaaggaggtgcacaacgtgtgggccacccacgcctgcgtgcccaccgacccctccccccaggagctggtgctgggcaacgtgaccgagaacttcaacatgtggaagaacgacatggtggaccagatgcacgaggacatcatctccctgtgggaccagtccctgaagccctgcgtgaagctgacccccctgtgcgtgaccctgatctgctccaacgccaccgtgaagaacggcaccgtggaggagatgaagaactgctccttcaacaccaccaccgagatccgcgacaaggagaagaaggagtacgccctgttctacaagcccgacatcgtgcccctgtccgagaccaacaacacctccgagtaccgcctgatcaactgcaacacctccgcctgcacccaggcctgccccaaggtgaccttcgagcccatccccatccactactgcgcccccgccggctacgccatcctgaagtgcaacgacgagaccttcaacggcaccggcccctgctccaacgtgtccaccgtgcagtgcacccacggcatccgccccgtggtgtccacccagctgctgctgaacggctccctggccgagaaggagatcgtgatccgctccgagaacctgaccaacaacgccaagatcatcatcgtgcacctgcacaagcccgtgacgatcgtgtgcacccgccccgacaacaacacccgcaagtccgtgcgcatcggccccggccagaccttctacgccaccggcgacatcatcggcgacatcaagcaggcccactgcaacatctccgaggagaagtggaacgacaccctgcagaaggtgggcatcgagctgcagaagcacttccccaacaagaccatcaagtacaaccagtccgccggcggcgacatggagatcaccacccactccttcaactgcggcggcgagttcttctactgcaacacctccaacctgttcaacggcacctacaacggcacctacatctccaccaactcctccgccaagtccacctccaccatcaccctgcagtgccgcatcaagcagatcatcaacatgtggcagggcgtgggccgctgcatgtacgccccccccatcgccggcgccatcacctgccgctccaacatcaccggcctgctgctgacccgcgacggcggcaccaactccaacgagaccgagaccttccgccccgccggcggcgacatgcgcgacaactggcgctccgagctgtacaagtacaaggtggtgaagatcgagcccctgggcgtggcccccacccgctgcaagcgccgcgtggtgggccgccgccgccgccgccgcgccgtgggcatcggcgccgtgttcctgggcttcctgggcgccgccggctccaccatgggcgccgcctccatgaccctgaccgtgcaggcccgcaacctgctgtccggcatcgtgcagcagcagtccaacctgctgcgcgcccccgaggcccagcagcacctgctgaagctgaccgtgtggggcatcaagcagctgcaggcccgcgtgctggccgtggagcgctacctgcgcgaccagcagctgctgggcatctggggctgctccggcaagctgatctgctgcaccaacgtgccctggaactcctcctggtccaaccgcaacctgtccgagatctgggacaacatgacctggctgcagtgggacaaggagatctccaactacacccagatcatctacggcctgctggaggagtcccagaaccagcaggagaagaacgagcaggacctgctggccctggactgataagcggccgcggatcc

SEQ ID NO: 74 - protein, 646 aa, synthetic construct
MGSLQPLATLYLLGMLVASVLAAENLWVTVYYGVPVWKEAKTTLFCASDARAYEKEVHNVWATHACVPTDPSPQELVLGNVTENFNMWKNDMVDQMHEDIISLWDQSLKPCVKLTPLCVTLICSNATVKNGTVEEMKNCSFNTTTEIRDKEKKEYALFYKPDIVPLSETNNTSEYRLINCNTSACTQACPKVTFEPIPIHYCAPAGYAILKCNDETFNGTGPCSNVSTVQCTHGIRPVVSTQLLLNGSLAEKEIVIRSENLTNNAKIIIVHLHKPVTIVCTRPDNNTRKSVRIGPGQTFYATGDIIGDIKQAHCNISEEKWNDTLQKVGIELQKHFPNKTIKYNQSAGGDMEITTHSFNCGGEFFYCNTSNLFNGTYNGTYISTNSSAKSTSTITLQCRIKQIINMWQGVGRCMYAPPIAGAITCRSNITGLLLTRDGGTNSNETETFRPAGGDMRDNWRSELYKYKVVKIEPLGVAPTRCKRRVVGRRRRRRAVGIGAVFLGFLGAAGSTMGAASMTLTVQARNLLSGIVQQQSNLLRAPEAQQHLLKLTVWGIKQLQARVLAVERYLRDQQLLGIWGCSGKLICCTNVPWNSSWSNRNLSEIWDNMTWLQWDKEISNYTQIIYGLLEESQNQQEKNEQDLLALD

SEQ ID NO: 75 - DNA, 1981 bp, synthetic construct
  source 1..1981: mol_type = other DNA
gtcgacaagcttcccgggccaccatgggctccctgcagcccctggccaccctgtacctgctgggcatgctggtggcctccgtgctggccgccgagaacctgtgggtgaccgtgtactacggcgtgcccgtgtggaaggaggccaagaccaccctgttctgcgcctccgacgcccgcgcctacgagaaggaggtgcacaacgtgtgggccacccacgcctgcgtgcccaccgacccctccccccaggagctggtgctgggcaacgtgaccgagaacttcaacatgtggaagaacgacatggtggaccagatgcacgaggacatcatctccctgtgggaccagtccctgaagccctgcgtgaagctgacccccctgtgcgtgaccctgatctgctccgacgccaccgtgaagaccggcaccgtggaggagatgaagaactgctccttcaacaccaccaccgagatccgcgacaaggagaagaaggagtacgccctgttctacaagcccgacatcgtgcccctgtccgagaccaacaacacctccgagtaccgcctgatcaactgcaacacctccgcctgcacccaggcctgccccaaggtgaccttcgagcccatccccatccactactgcgcccccgccggctacgccatcctgaagtgcaacgacgagaccttcaacggcaccggcccctgctccaacgtgtccaccgtgcagtgcacccacggcatccgccccgtggtgtccacccagctgctgctgaacggctccctggccgagaaggagatcgtgatccgctccgagaacctgaccaacaacgccaagatcatcatcgtgcacctgcacacccccgtggagatcgtgtgcacccgccccgacaacaacacccgcaagtccgtgcgcatcggccccggccagaccttctacgccaccggcgacatcatcggcgacatcaagcaggcccactgcaacatctccgaggagaagtggaacgacaccctgcagaaggtgggcatcgagctgcagaagcacttccccaacaagaccatcaagtacaaccagtccgccggcggcgacatggagatcaccacccactccttcaactgcggcggcgagttcttctactgcaacacctccaacctgttcaacggcacctacaacggcacctacatctccaccaactcctccgccaactccacctccaccatcaccctgcagtgccgcatcaagcagatcatcaacatgtggcagggcgtgggccgctgcatgtacgccccccccatcgccggcaacatcacctgccgctccaacatcaccggcctgctgctgacccgcgacggcggcaccaactccaacgagaccgagaccttccgccccgccggcggcgacatgcgcgacaactggcgctccgagctgtacaagtacaaggtggtgaagatcgagcccctgggcgtggcccccacccgctgcaagcgccgcgtggtgggccgccgccgccgccgccgcgccgtgggcatcggcgccgtgttcctgggcttcctgggcgccgccggctccaccatgggcgccgcctccatgaccctgaccgtgcaggcccgcaacctgctgtccggcatcgtgcagcagcagtccaacctgctgcgcgcccccgaggcccagcagcacctgctgaagctgaccgtgtggggcatcaagcagctgcaggcccgcgtgctggccgtggagcgctacctgcgcgaccagcagctgctgggcatctggggctgctccggcaagctgatctgctgcaccaacgtgccctggaactcctcctggtccaaccgcaacctgtccgagatctgggacaacatgacctggctgcagtgggacaaggagatctccaactacacccagatcatctacggcctgctggaggagtcccagaaccagcaggagaagaacgagcaggacctgctggccctggactgataagcggccgcggatcc

SEQ ID NO: 76 - protein, 646 aa, synthetic construct
MGSLQPLATLYLLGMLVASVLAAENLWVTVYYGVPVWKEAKTTLFCASDARAYEKEVHNVWATHACVPTDPSPQELVLGNVTENFNMWKNDMVDQMHEDIISLWDQSLKPCVKLTPLCVTLICSDATVKTGTVEEMKNCSFNTTTEIRDKEKKEYALFYKPDIVPLSETNNTSEYRLINCNTSACTQACPKVTFEPIPIHYCAPAGYAILKCNDETFNGTGPCSNVSTVQCTHGIRPVVSTQLLLNGSLAEKEIVIRSENLTNNAKIIIVHLHTPVEIVCTRPDNNTRKSVRIGPGQTFYATGDIIGDIKQAHCNISEEKWNDTLQKVGIELQKHFPNKTIKYNQSAGGDMEITTHSFNCGGEFFYCNTSNLFNGTYNGTYISTNSSANSTSTITLQCRIKQIINMWQGVGRCMYAPPIAGNITCRSNITGLLLTRDGGTNSNETETFRPAGGDMRDNWRSELYKYKVVKIEPLGVAPTRCKRRVVGRRRRRRAVGIGAVFLGFLGAAGSTMGAASMTLTVQARNLLSGIVQQQSNLLRAPEAQQHLLKLTVWGIKQLQARVLAVERYLRDQQLLGIWGCSGKLICCTNVPWNSSWSNRNLSEIWDNMTWLQWDKEISNYTQIIYGLLEESQNQQEKNEQDLLALD

SEQ ID NO: 77 - DNA, 1981 bp, synthetic construct
  source 1..1981: mol_type = other DNA
gtcgacaagcttcccgggccaccatgggctccctgcagcccctggccaccctgtacctgctgggcatgctggtggcctccgtgctggccgccgagaacctgtgggtgaccgtgtactacggcgtgcccgtgtggaaggaggccaagaccaccctgttctgcgcctccgacgcccgcgcctacgagaaggaggtgcacaacgtgtgggccacccacgcctgcgtgcccaccgacccctccccccaggagctggtgctgggcaacgtgaccgagaacttcaacatgtggaagaacgacatggtggaccagatgcacgaggacatcatctccctgtgggaccagtccctgaagccctgcgtgaagctgacccccctgtgcgtgaccctgatctgctccaacgccaccgtgaagaacggcaccgtggaggagatgaagaactgctccttcaacaccaccaccgagatccgcgacaaggagaagaaggagtacgccctgttctacaagcccgacatcgtgcccctgtccgagaccaacaacacctccgagtaccgcctgatcaactgcaacacctccgcctgcacccaggcctgccccaaggtgaccttcgagcccatccccatccactactgcgcccccgccggctacgccatcctgaagtgcaacgacgagaccttcaacggcaccggcccctgctccaacgtgtccaccgtgcagtgcacccacggcatccgccccgtggtgtccacccagctgctgctgaacggctccctggccgagaaggagatcgtgatccgctccgagaacctgaccaacaacgccaagatcatcatcgtgcacctgcacacccccgtggagatcgtgtgcacccgcccccgcaacgacacccgcaagtccgtgcgcatcggccccggccagaccttctacgccaccggcgacatcatcggcgacatcaagcaggcccactgcaacatctccgaggagaagtggaacgacaccctgcagaaggtgggcatcgagctgcagaagcacttccccaacaagaccatcaagtacaaccagtccgccggcggcgacatggagatcaccacccactccttcaactgcggcggcgagttcttctactgcaacacctccaacctgttcaacggcacctacaacggcacctacatctccaccaactcctccgccaactccacctccaccatcaccctgcagtgccgcatcaagcagatcatcaacatgtggcagggcgtgggccgctgcatgtacgccccccccatcgccggcaacatcacctgccgctccaacatcaccggcctgctgctgacccgcgacggcggcaccaactccaacgagaccgagaccttccgccccgccggcggcgacatgcgcgacaactggcgctccgagctgtacaagtacaaggtggtgaagatcgagcccctgggcgtggcccccacccgctgcaagcgccgcgtggtgggccgccgccgccgccgccgcgccgtgggcatcggcgccgtgttcctgggcttcctgggcgccgccggctccaccatgggcgccgcctccatgaccctgaccgtgcaggcccgcaacctgctgtccggcatcgtgcagcagcagtccaacctgctgcgcgcccccgaggcccagcagcacctgctgaagctgaccgtgtggggcatcaagcagctgcaggcccgcgtgctggccgtggagcgctacctgcgcgaccagcagctgctgggcatctggggctgctccggcaagctgatctgctgcaccaacgtgccctggaactcctcctggtccaaccgcaacctgtccgagatctgggacaacatgacctggctgcagtgggacaaggagatctccaactacacccagatcatctacggcctgctggaggagtcccagaaccagcaggagaagaacgagcaggacctgctggccctggactgataagcggccgcggatcc

SEQ ID NO: 78 - protein, 646 aa, synthetic construct
MGSLQPLATLYLLGMLVASVLAAENLWVTVYYGVPVWKEAKTTLFCASDARAYEKEVHNVWATHACVPTDPSPQELVLGNVTENFNMWKNDMVDQMHEDIISLWDQSLKPCVKLTPLCVTLICSNATVKNGTVEEMKNCSFNTTTEIRDKEKKEYALFYKPDIVPLSETNNTSEYRLINCNTSACTQACPKVTFEPIPIHYCAPAGYAILKCNDETFNGTGPCSNVSTVQCTHGIRPVVSTQLLLNGSLAEKEIVIRSENLTNNAKIIIVHLHTPVEIVCTRPRNDTRKSVRIGPGQTFYATGDIIGDIKQAHCNISEEKWNDTLQKVGIELQKHFPNKTIKYNQSAGGDMEITTHSFNCGGEFFYCNTSNLFNGTYNGTYISTNSSANSTSTITLQCRIKQIINMWQGVGRCMYAPPIAGNITCRSNITGLLLTRDGGTNSNETETFRPAGGDMRDNWRSELYKYKVVKIEPLGVAPTRCKRRVVGRRRRRRAVGIGAVFLGFLGAAGSTMGAASMTLTVQARNLLSGIVQQQSNLLRAPEAQQHLLKLTVWGIKQLQARVLAVERYLRDQQLLGIWGCSGKLICCTNVPWNSSWSNRNLSEIWDNMTWLQWDKEISNYTQIIYGLLEESQNQQEKNEQDLLALD

SEQ ID NO: 79 - DNA, 1981 bp, synthetic construct
  source 1..1981: mol_type = other DNA
gtcgacaagcttcccgggccaccatgggctccctgcagcccctggccaccctgtacctgctgggcatgctggtggcctccgtgctggccgccgagaacctgtgggtgaccgtgtactacggcgtgcccgtgtggaaggaggccaagaccaccctgttctgcgcctccgacgcccgcgcctacgagaaggaggtgcacaacgtgtgggccacccacgcctgcgtgcccaccgacccctccccccaggagctggtgctgggcaacgtgaccgagaacttcaacatgtggaagaacgacatggtggaccagatgcacgaggacatcatctccctgtgggaccagtccctgaagccctgcgtgaagctgacccccctgtgcgtgaccctgatctgctccaacgccaccgtgaagaacggcaccgtggaggagatgaagaactgctccttcaacaccaccaccgagatccgcgacaaggagaagaaggagtacgccctgttctacaagcccgacatcgtgcccctgtccgagaccaacaacacctccgagtaccgcctgatcaactgcaacacctccgcctgcacccaggcctgccccaaggtgaccttcgagcccatccccatccactactgcgcccccgccggctacgccatcctgaagtgcaacgacgagaccttcaacggcaccggcccctgctccaacgtgtccaccgtgcagtgcacccacggcatccgccccgtggtgtccacccagctgctgctgaacggctccctggccgagaaggagatcgtgatccgctccgagaacctgaccaacaacgccaagatcatcatcgtgcacctgcacaagcccgtgacgatcgtgtgcacccgcccccgcaacgacacccgcaagtccgtgcgcatcggccccggccagaccttctacgccaccggcgacatcatcggcgacatcaagcaggcccactgcaacatctccgaggagaagtggaacgacaccctgcagaaggtgggcatcgagctgcagaagcacttccccaacaagaccatcaagtacaaccagtccgccggcggcgacatggagatcaccacccactccttcaactgcggcggcgagttcttctactgcaacacctccaacctgttcaacggcacctacaacggcacctacatctccaccaactcctccgccaagtccacctccaccatcaccctgcagtgccgcatcaagcagatcatcaacatgtggcagggcgtgggccgctgcatgtacgccccccccatcgccggcgccatcacctgccgctccaacatcaccggcctgctgctgacccgcgacggcggcaccaactccaacgagaccgagaccttccgccccgccggcggcgacatgcgcgacaactggcgctccgagctgtacaagtacaaggtggtgaagatcgagcccctgggcgtggcccccacccgctgcaagcgccgcgtggtgggccgccgccgccgccgccgcgccgtgggcatcggcgccgtgttcctgggcttcctgggcgccgccggctccaccatgggcgccgcctccatgaccctgaccgtgcaggcccgcaacctgctgtccggcatcgtgcagcagcagtccaacctgctgcgcgcccccgaggcccagcagcacctgctgaagctgaccgtgtggggcatcaagcagctgcaggcccgcgtgctggccgtggagcgctacctgcgcgaccagcagctgctgggcatctggggctgctccggcaagctgatctgctgcaccaacgtgccctggaactcctcctggtccaaccgcaacctgtccgagatctgggacaacatgacctggctgcagtgggacaaggagatctccaactacacccagatcatctacggcctgctggaggagtcccagaaccagcaggagaagaacgagcaggacctgctggccctggactgataagcggccgcggatcc

SEQ ID NO: 80 - protein, 646 aa, synthetic construct
MGSLQPLATLYLLGMLVASVLAAENLWVTVYYGVPVWKEAKTTLFCASDARAYEKEVHNVWATHACVPTDPSPQELVLGNVTENFNMWKNDMVDQMHEDIISLWDQSLKPCVKLTPLCVTLICSNATVKNGTVEEMKNCSFNTTTEIRDKEKKEYALFYKPDIVPLSETNNTSEYRLINCNTSACTQACPKVTFEPIPIHYCAPAGYAILKCNDETFNGTGPCSNVSTVQCTHGIRPVVSTQLLLNGSLAEKEIVIRSENLTNNAKIIIVHLHKPVTIVCTRPRNDTRKSVRIGPGQTFYATGDIIGDIKQAHCNISEEKWNDTLQKVGIELQKHFPNKTIKYNQSAGGDMEITTHSFNCGGEFFYCNTSNLFNGTYNGTYISTNSSAKSTSTITLQCRIKQIINMWQGVGRCMYAPPIAGAITCRSNITGLLLTRDGGTNSNETETFRPAGGDMRDNWRSELYKYKVVKIEPLGVAPTRCKRRVVGRRRRRRAVGIGAVFLGFLGAAGSTMGAASMTLTVQARNLLSGIVQQQSNLLRAPEAQQHLLKLTVWGIKQLQARVLAVERYLRDQQLLGIWGCSGKLICCTNVPWNSSWSNRNLSEIWDNMTWLQWDKEISNYTQIIYGLLEESQNQQEKNEQDLLALD

SEQ ID NO: 81 - DNA, 1981 bp, synthetic construct
  source 1..1981: mol_type = other DNA
gtcgacaagcttcccgggccaccatgggctccctgcagcccctggccaccctgtacctgctgggcatgctggtggcctccgtgctggccgccgagaacctgtgggtgaccgtgtactacggcgtgcccgtgtggaaggaggccaagaccaccctgttctgcgcctccgacgcccgcgcctacgagaaggaggtgcacaacgtgtgggccacccacgcctgcgtgcccaccgacccctccccccaggagctggtgctgggcaacgtgaccgagaacttcaacatgtggaagaacgacatggtggaccagatgcacgaggacatcatctccctgtgggaccagtccctgaagccctgcgtgaagctgacccccctgtgcgtgaccctgatctgctccgacgccaccgtgaagaccggcaccgtggaggagatgaagaactgctccttcaacaccaccaccgagatccgcgacaaggagaagaaggagtacgccctgttctacaagcccgacatcgtgcccctgtccgagaccaacaacacctccgagtaccgcctgatcaactgcaacacctccgcctgcacccaggcctgccccaaggtgaccttcgagcccatccccatccactactgcgcccccgccggctacgccatcctgaagtgcaacgacgagaccttcaacggcaccggcccctgctccaacgtgtccaccgtgcagtgcacccacggcatccgccccgtggtgtccacccagctgctgctgaacggctccctggccgagaaggagatcgtgatccgctccgagaacctgaccaacaacgccaagatcatcatcgtgcacctgcacacccccgtggagatcgtgtgcacccgcccccgcaacgacacccgcaagtccgtgcgcatcggccccggccagaccttctacgccaccggcgacatcatcggcgacatcaagcaggcccactgcaacatctccgaggagaagtggaacgacaccctgcagaaggtgggcatcgagctgcagaagcacttccccaacaagaccatcaagtacaaccagtccgccggcggcgacatggagatcaccacccactccttcaactgcggcggcgagttcttctactgcaacacctccaacctgttcaacggcacctacaacggcacctacatctccaccaactcctccgccaactccacctccaccatcaccctgcagtgccgcatcaagcagatcatcaacatgtggcagggcgtgggccgctgcatgtacgccccccccatcgccggcaacatcacctgccgctccaacatcaccggcctgctgctgacccgcgacggcggcaccaactccaacgagaccgagaccttccgccccgccggcggcgacatgcgcgacaactggcgctccgagctgtacaagtacaaggtggtgaagatcgagcccctgggcgtggcccccacccgctgcaagcgccgcgtggtgggccgccgccgccgccgccgcgccgtgggcatcggcgccgtgttcctgggcttcctgggcgccgccggctccaccatgggcgccgcctccatgaccctgaccgtgcaggcccgcaacctgctgtccggcatcgtgcagcagcagtccaacctgctgcgcgcccccgaggcccagcagcacctgctgaagctgaccgtgtggggcatcaagcagctgcaggcccgcgtgctggccgtggagcgctacctgcgcgaccagcagctgctgggcatctggggctgctccggcaagctgatctgctgcaccaacgtgccctggaactcctcctggtccaaccgcaacctgtccgagatctgggacaacatgacctggctgcagtgggacaaggagatctccaactacacccagatcatctacggcctgctggaggagtcccagaaccagcaggagaagaacgagcaggacctgctggccctggactgataagcggccgcggatcc

SEQ ID NO: 82 - protein, 646 aa, synthetic construct
MGSLQPLATLYLLGMLVASVLAAENLWVTVYYGVPVWKEAKTTLFCASDARAYEKEVHNVWATHACVPTDPSPQELVLGNVTENFNMWKNDMVDQMHEDIISLWDQSLKPCVKLTPLCVTLICSDATVKTGTVEEMKNCSFNTTTEIRDKEKKEYALFYKPDIVPLSETNNTSEYRLINCNTSACTQACPKVTFEPIPIHYCAPAGYAILKCNDETFNGTGPCSNVSTVQCTHGIRPVVSTQLLLNGSLAEKEIVIRSENLTNNAKIIIVHLHTPVEIVCTRPRNDTRKSVRIGPGQTFYATGDIIGDIKQAHCNISEEKWNDTLQKVGIELQKHFPNKTIKYNQSAGGDMEITTHSFNCGGEFFYCNTSNLFNGTYNGTYISTNSSANSTSTITLQCRIKQIINMWQGVGRCMYAPPIAGNITCRSNITGLLLTRDGGTNSNETETFRPAGGDMRDNWRSELYKYKVVKIEPLGVAPTRCKRRVVGRRRRRRAVGIGAVFLGFLGAAGSTMGAASMTLTVQARNLLSGIVQQQSNLLRAPEAQQHLLKLTVWGIKQLQARVLAVERYLRDQQLLGIWGCSGKLICCTNVPWNSSWSNRNLSEIWDNMTWLQWDKEISNYTQIIYGLLEESQNQQEKNEQDLLALD

SEQ ID NO: 83 - DNA, 1981 bp, synthetic construct
  source 1..1981: mol_type = other DNA
gtcgacaagcttcccgggccaccatgggctccctgcagcccctggccaccctgtacctgctgggcatgctggtggcctccgtgctggccgccgagaacctgtgggtgaccgtgtactacggcgtgcccgtgtggaaggaggccaagaccaccctgttctgcgcctccgacgcccgcgcctacgagaaggaggtgcacaacgtgtgggccacccacgcctgcgtgcccaccgacccctccccccaggagctggtgctgggcaacgtgaccgagaacttcaacatgtggaagaacgacatggtggaccagatgcacgaggacatcatctccctgtgggaccagtccctgaagccctgcgtgaagctgacccccctgtgcgtgaccctgatctgctccaacgccaccgtgaagaacggcaccgtggaggagatgaagaactgctccttcaacaccaccaccgagatccgcgacaaggagaagaaggagtacgccctgttctacaagcccgacatcgtgcccctgtccgagaccaacaacacctccgagtaccgcctgatcaactgcaacacctccgcctgcacccaggcctgccccaaggtgaccttcgagcccatccccatccactactgcgcccccgccggctacgccatcctgaagtgcaacgacgagaccttcaacggcaccggcccctgctccaacgtgtccaccgtgcagtgcacccacggcatccgccccgtggtgtccacccagctgctgctgaacggctccctggccgagaaggagatcgtgatccgctccgagaacctgaccaacaacgccaagatcatcatcgtgcacctgcacacccccgtggagatcgtgtgcacccgccccaagaacgacacccgcaagtccgtgcgcatcggccccggccagaccttctacgccaccggcgacatcatcggcgacatcaagcaggcccactgcaacatctccgaggagaagtggaacgacaccctgcagaaggtgggcatcgagctgcagaagcacttccccaacaagaccatcaagtacaaccagtccgccggcggcgacatggagatcaccacccactccttcaactgcggcggcgagttcttctactgcaacacctccaacctgttcaacggcacctacaacggcacctacatctccaccaactcctccgccaactccacctccaccatcaccctgcagtgccgcatcaagcagatcatcaacatgtggcagggcgtgggccgctgcatgtacgccccccccatcgccggcaacatcacctgccgctccaacatcaccggcctgctgctgacccgcgacggcggcaccaactccaacgagaccgagaccttccgccccgccggcggcgacatgcgcgacaactggcgctccgagctgtacaagtacaaggtggtgaagatcgagcccctgggcgtggcccccacccgctgcaagcgccgcgtggtgggccgccgccgccgccgccgcgccgtgggcatcggcgccgtgttcctgggcttcctgggcgccgccggctccaccatgggcgccgcctccatgaccctgaccgtgcaggcccgcaacctgctgtccggcatcgtgcagcagcagtccaacctgctgcgcgcccccgaggcccagcagcacctgctgaagctgaccgtgtggggcatcaagcagctgcaggcccgcgtgctggccgtggagcgctacctgcgcgaccagcagctgctgggcatctggggctgctccggcaagctgatctgctgcaccaacgtgccctggaactcctcctggtccaaccgcaacctgtccgagatctgggacaacatgacctggctgcagtgggacaaggagatctccaactacacccagatcatctacggcctgctggaggagtcccagaaccagcaggagaagaacgagcaggacctgctggccctggactgataagcggccgcggatcc

SEQ ID NO: 84 - protein, 646 aa, synthetic construct
MGSLQPLATLYLLGMLVASVLAAENLWVTVYYGVPVWKEAKTTLFCASDARAYEKEVHNVWATHACVPTDPSPQELVLGNVTENFNMWKNDMVDQMHEDIISLWDQSLKPCVKLTPLCVTLICSNATVKNGTVEEMKNCSFNTTTEIRDKEKKEYALFYKPDIVPLSETNNTSEYRLINCNTSACTQACPKVTFEPIPIHYCAPAGYAILKCNDETFNGTGPCSNVSTVQCTHGIRPVVSTQLLLNGSLAEKEIVIRSENLTNNAKIIIVHLHTPVEIVCTRPKNDTRKSVRIGPGQTFYATGDIIGDIKQAHCNISEEKWNDTLQKVGIELQKHFPNKTIKYNQSAGGDMEITTHSFNCGGEFFYCNTSNLFNGTYNGTYISTNSSANSTSTITLQCRIKQIINMWQGVGRCMYAPPIAGNITCRSNITGLLLTRDGGTNSNETETFRPAGGDMRDNWRSELYKYKVVKIEPLGVAPTRCKRRVVGRRRRRRAVGIGAVFLGFLGAAGSTMGAASMTLTVQARNLLSGIVQQQSNLLRAPEAQQHLLKLTVWGIKQLQARVLAVERYLRDQQLLGIWGCSGKLICCTNVPWNSSWSNRNLSEIWDNMTWLQWDKEISNYTQIIYGLLEESQNQQEKNEQDLLALD

SEQ ID NO: 85 - DNA, 1981 bp, synthetic construct
  source 1..1981: mol_type = other DNA
gtcgacaagcttcccgggccaccatgggctccctgcagcccctggccaccctgtacctgctgggcatgctggtggcctccgtgctggccgccgagaacctgtgggtgaccgtgtactacggcgtgcccgtgtggaaggaggccaagaccaccctgttctgcgcctccgacgcccgcgcctacgagaaggaggtgcacaacgtgtgggccacccacgcctgcgtgcccaccgacccctccccccaggagctggtgctgggcaacgtgaccgagaacttcaacatgtggaagaacgacatggtggaccagatgcacgaggacatcatctccctgtgggaccagtccctgaagccctgcgtgaagctgacccccctgtgcgtgaccctgatctgctccaacgccaccgtgaagaacggcaccgtggaggagatgaagaactgctccttcaacaccaccaccgagatccgcgacaaggagaagaaggagtacgccctgttctacaagcccgacatcgtgcccctgtccgagaccaacaacacctccgagtaccgcctgatcaactgcaacacctccgcctgcacccaggcctgccccaaggtgaccttcgagcccatccccatccactactgcgcccccgccggctacgccatcctgaagtgcaacgacgagaccttcaacggcaccggcccctgctccaacgtgtccaccgtgcagtgcacccacggcatccgccccgtggtgtccacccagctgctgctgaacggctccctggccgagaaggagatcgtgatccgctccgagaacctgaccaacaacgccaagatcatcatcgtgcacctgcacaagcccgtgacgatcgtgtgcacccgccccaagaacgacacccgcaagtccgtgcgcatcggccccggccagaccttctacgccaccggcgacatcatcggcgacatcaagcaggcccactgcaacatctccgaggagaagtggaacgacaccctgcagaaggtgggcatcgagctgcagaagcacttccccaacaagaccatcaagtacaaccagtccgccggcggcgacatggagatcaccacccactccttcaactgcggcggcgagttcttctactgcaacacctccaacctgttcaacggcacctacaacggcacctacatctccaccaactcctccgccaagtccacctccaccatcaccctgcagtgccgcatcaagcagatcatcaacatgtggcagggcgtgggccgctgcatgtacgccccccccatcgccggcgccatcacctgccgctccaacatcaccggcctgctgctgacccgcgacggcggcaccaactccaacgagaccgagaccttccgccccgccggcggcgacatgcgcgacaactggcgctccgagctgtacaagtacaaggtggtgaagatcgagcccctgggcgtggcccccacccgctgcaagcgccgcgtggtgggccgccgccgccgccgccgcgccgtgggcatcggcgccgtgttcctgggcttcctgggcgccgccggctccaccatgggcgccgcctccatgaccctgaccgtgcaggcccgcaacctgctgtccggcatcgtgcagcagcagtccaacctgctgcgcgcccccgaggcccagcagcacctgctgaagctgaccgtgtggggcatcaagcagctgcaggcccgcgtgctggccgtggagcgctacctgcgcgaccagcagctgctgggcatctggggctgctccggcaagctgatctgctgcaccaacgtgccctggaactcctcctggtccaaccgcaacctgtccgagatctgggacaacatgacctggctgcagtgggacaaggagatctccaactacacccagatcatctacggcctgctggaggagtcccagaaccagcaggagaagaacgagcaggacctgctggccctggactgataagcggccgcggatcc

SEQ ID NO: 86 - protein, 646 aa, synthetic construct
MGSLQPLATLYLLGMLVASVLAAENLWVTVYYGVPVWKEAKTTLFCASDARAYEKEVHNVWATHACVPTDPSPQELVLGNVTENFNMWKNDMVDQMHEDIISLWDQSLKPCVKLTPLCVTLICSNATVKNGTVEEMKNCSFNTTTEIRDKEKKEYALFYKPDIVPLSETNNTSEYRLINCNTSACTQACPKVTFEPIPIHYCAPAGYAILKCNDETFNGTGPCSNVSTVQCTHGIRPVVSTQLLLNGSLAEKEIVIRSENLTNNAKIIIVHLHKPVTIVCTRPKNDTRKSVRIGPGQTFYATGDIIGDIKQAHCNISEEKWNDTLQKVGIELQKHFPNKTIKYNQSAGGDMEITTHSFNCGGEFFYCNTSNLFNGTYNGTYISTNSSAKSTSTITLQCRIKQIINMWQGVGRCMYAPPIAGAITCRSNITGLLLTRDGGTNSNETETFRPAGGDMRDNWRSELYKYKVVKIEPLGVAPTRCKRRVVGRRRRRRAVGIGAVFLGFLGAAGSTMGAASMTLTVQARNLLSGIVQQQSNLLRAPEAQQHLLKLTVWGIKQLQARVLAVERYLRDQQLLGIWGCSGKLICCTNVPWNSSWSNRNLSEIWDNMTWLQWDKEISNYTQIIYGLLEESQNQQEKNEQDLLALD

SEQ ID NO: 87 - DNA, 1981 bp, synthetic construct
  source 1..1981: mol_type = other DNA
gtcgacaagcttcccgggccaccatgggctccctgcagcccctggccaccctgtacctgctgggcatgctggtggcctccgtgctggccgccgagaacctgtgggtgaccgtgtactacggcgtgcccgtgtggaaggaggccaagaccaccctgttctgcgcctccgacgcccgcgcctacgagaaggaggtgcacaacgtgtgggccacccacgcctgcgtgcccaccgacccctccccccaggagctggtgctgggcaacgtgaccgagaacttcaacatgtggaagaacgacatggtggaccagatgcacgaggacatcatctccctgtgggaccagtccctgaagccctgcgtgaagctgacccccctgtgcgtgaccctgatctgctccgacgccaccgtgaagaccggcaccgtggaggagatgaagaactgctccttcaacaccaccaccgagatccgcgacaaggagaagaaggagtacgccctgttctacaagcccgacatcgtgcccctgtccgagaccaacaacacctccgagtaccgcctgatcaactgcaacacctccgcctgcacccaggcctgccccaaggtgaccttcgagcccatccccatccactactgcgcccccgccggctacgccatcctgaagtgcaacgacgagaccttcaacggcaccggcccctgctccaacgtgtccaccgtgcagtgcacccacggcatccgccccgtggtgtccacccagctgctgctgaacggctccctggccgagaaggagatcgtgatccgctccgagaacctgaccaacaacgccaagatcatcatcgtgcacctgcacacccccgtggagatcgtgtgcacccgccccaagaacgacacccgcaagtccgtgcgcatcggccccggccagaccttctacgccaccggcgacatcatcggcgacatcaagcaggcccactgcaacatctccgaggagaagtggaacgacaccctgcagaaggtgggcatcgagctgcagaagcacttccccaacaagaccatcaagtacaaccagtccgccggcggcgacatggagatcaccacccactccttcaactgcggcggcgagttcttctactgcaacacctccaacctgttcaacggcacctacaacggcacctacatctccaccaactcctccgccaactccacctccaccatcaccctgcagtgccgcatcaagcagatcatcaacatgtggcagggcgtgggccgctgcatgtacgccccccccatcgccggcaacatcacctgccgctccaacatcaccggcctgctgctgacccgcgacggcggcaccaactccaacgagaccgagaccttccgccccgccggcggcgacatgcgcgacaactggcgctccgagctgtacaagtacaaggtggtgaagatcgagcccctgggcgtggcccccacccgctgcaagcgccgcgtggtgggccgccgccgccgccgccgcgccgtgggcatcggcgccgtgttcctgggcttcctgggcgccgccggctccaccatgggcgccgcctccatgaccctgaccgtgcaggcccgcaacctgctgtccggcatcgtgcagcagcagtccaacctgctgcgcgcccccgaggcccagcagcacctgctgaagctgaccgtgtggggcatcaagcagctgcaggcccgcgtgctggccgtggagcgctacctgcgcgaccagcagctgctgggcatctggggctgctccggcaagctgatctgctgcaccaacgtgccctggaactcctcctggtccaaccgcaacctgtccgagatctgggacaacatgacctggctgcagtgggacaaggagatctccaactacacccagatcatctacggcctgctggaggagtcccagaaccagcaggagaagaacgagcaggacctgctggccctggactgataagcggccgcggatcc

SEQ ID NO: 88 - protein, 646 aa, synthetic construct
MGSLQPLATLYLLGMLVASVLAAENLWVTVYYGVPVWKEAKTTLFCASDARAYEKEVHNVWATHACVPTDPSPQELVLGNVTENFNMWKNDMVDQMHEDIISLWDQSLKPCVKLTPLCVTLICSDATVKTGTVEEMKNCSFNTTTEIRDKEKKEYALFYKPDIVPLSETNNTSEYRLINCNTSACTQACPKVTFEPIPIHYCAPAGYAILKCNDETFNGTGPCSNVSTVQCTHGIRPVVSTQLLLNGSLAEKEIVIRSENLTNNAKIIIVHLHTPVEIVCTRPKNDTRKSVRIGPGQTFYATGDIIGDIKQAHCNISEEKWNDTLQKVGIELQKHFPNKTIKYNQSAGGDMEITTHSFNCGGEFFYCNTSNLFNGTYNGTYISTNSSANSTSTITLQCRIKQIINMWQGVGRCMYAPPIAGNITCRSNITGLLLTRDGGTNSNETETFRPAGGDMRDNWRSELYKYKVVKIEPLGVAPTRCKRRVVGRRRRRRAVGIGAVFLGFLGAAGSTMGAASMTLTVQARNLLSGIVQQQSNLLRAPEAQQHLLKLTVWGIKQLQARVLAVERYLRDQQLLGIWGCSGKLICCTNVPWNSSWSNRNLSEIWDNMTWLQWDKEISNYTQIIYGLLEESQNQQEKNEQDLLALD

SEQ ID NO: 89 - DNA, 1981 bp, synthetic construct
  source 1..1981: mol_type = other DNA
gtcgacaagcttcccgggccaccatgggctccctgcagcccctggccaccctgtacctgctgggcatgctggtggcctccgtgctggccgccgagaacctgtgggtgaccgtgtactacggcgtgcccgtgtggaaggaggccaagaccaccctgttctgcgcctccgacgcccgcgcctacgagaaggaggtgcacaacgtgtgggccacccacgcctgcgtgcccaccgacccctccccccaggagctggtgctgggcaacgtgaccgagaacttcaacatgtggaagaacgacatggtggaccagatgcacgaggacatcatctccctgtgggaccagtccctgaagccctgcgtgaagctgacccccctgtgcgtgaccctgatctgctccaacgccaccgtgaagaacggcaccgtggaggagatgaagaactgctccttcaacaccaccaccgagatccgcgacaaggagaagaaggagtacgccctgttctacaagcccgacatcgtgcccctgtccgagaccaacaacacctccgagtaccgcctgatcaactgcaacacctccgcctgcacccaggcctgccccaaggtgaccttcgagcccatccccatccactactgcgcccccgccggctacgccatcctgaagtgcaacgacgagaccttcaacggcaccggcccctgctccaacgtgtccaccgtgcagtgcacccacggcatccgccccgtggtgtccacccagctgctgctgaacggctccctggccgagaaggagatcgtgatccgctccgagaacctgaccaacaacgccaagatcatcatcgtgcacctgcacacccccgtggagatcgtgtgcacccgccccaacaacaacacccgcaagtccgtgcgcatcggccccggccagaccttctacgccaccggcgacatcatcggcgacatcaagcaggcccactgcaacatctccgaggagaagtggaacgacaccctgcagaaggtgggcatcgagctgcagaagcacttccccaacaagaccatcaagtacaaccagtccgccggcggcgacatggagatcaccacccactccttcaactgcggcggcgagttcttctactgcaacacctccaacctgttcaacggcacctacaacggcacctacatctccaccaactcctccgccaactccacctccaccatcaccctgtactgccgcatcaagcagatcatcaacatgtggcagggcgtgggccgctgcatgtacgccccccccatcgccggcaacatcacctgccgctccaacatcaccggcctgctgctgacccgcgacggcggcaccaactccaacgagaccgagaccttccgccccgccggcggcgacatgcgcgacaactggcgctccgagctgtacaagtacaaggtggtgaagatcgagcccctgggcgtggcccccacccgctgcaagcgccgcgtggtgggccgccgccgccgccgccgcgccgtgggcatcggcgccgtgttcctgggcttcctgggcgccgccggctccaccatgggcgccgcctccatgaccctgaccgtgcaggcccgcaacctgctgtccggcatcgtgcagcagcagtccaacctgctgcgcgcccccgaggcccagcagcacctgctgaagctgaccgtgtggggcatcaagcagctgcaggcccgcgtgctggccgtggagcgctacctgcgcgaccagcagctgctgggcatctggggctgctccggcaagctgatctgctgcaccaacgtgccctggaactcctcctggtccaaccgcaacctgtccgagatctgggacaacatgacctggctgcagtgggacaaggagatctccaactacacccagatcatctacggcctgctggaggagtcccagaaccagcaggagaagaacgagcaggacctgctggccctggactgataagcggccgcggatcc

SEQ ID NO: 90 - protein, 646 aa, synthetic construct
MGSLQPLATLYLLGMLVASVLAAENLWVTVYYGVPVWKEAKTTLFCASDARAYEKEVHNVWATHACVPTDPSPQELVLGNVTENFNMWKNDMVDQMHEDIISLWDQSLKPCVKLTPLCVTLICSNATVKNGTVEEMKNCSFNTTTEIRDKEKKEYALFYKPDIVPLSETNNTSEYRLINCNTSACTQACPKVTFEPIPIHYCAPAGYAILKCNDETFNGTGPCSNVSTVQCTHGIRPVVSTQLLLNGSLAEKEIVIRSENLTNNAKIIIVHLHTPVEIVCTRPNNNTRKSVRIGPGQTFYATGDIIGDIKQAHCNISEEKWNDTLQKVGIELQKHFPNKTIKYNQSAGGDMEITTHSFNCGGEFFYCNTSNLFNGTYNGTYISTNSSANSTSTITLYCRIKQIINMWQGVGRCMYAPPIAGNITCRSNITGLLLTRDGGTNSNETETFRPAGGDMRDNWRSELYKYKVVKIEPLGVAPTRCKRRVVGRRRRRRAVGIGAVFLGFLGAAGSTMGAASMTLTVQARNLLSGIVQQQSNLLRAPEAQQHLLKLTVWGIKQLQARVLAVERYLRDQQLLGIWGCSGKLICCTNVPWNSSWSNRNLSEIWDNMTWLQWDKEISNYTQIIYGLLEESQNQQEKNEQDLLALD

SEQ ID NO: 91 - DNA, 1981 bp, synthetic construct
  source 1..1981: mol_type = other DNA
gtcgacaagcttcccgggccaccatgggctccctgcagcccctggccaccctgtacctgctgggcatgctggtggcctccgtgctggccgccgagaacctgtgggtgaccgtgtactacggcgtgcccgtgtggaaggaggccaagaccaccctgttctgcgcctccgacgcccgcgcctacgagaaggaggtgcacaacgtgtgggccacccacgcctgcgtgcccaccgacccctccccccaggagctggtgctgggcaacgtgaccgagaacttcaacatgtggaagaacgacatggtggaccagatgcacgaggacatcatctccctgtgggaccagtccctgaagccctgcgtgaagctgacccccctgtgcgtgaccctgatctgctccaacgccaccgtgaagaacggcaccgtggaggagatgaagaactgctccttcaacaccaccaccgagatccgcgacaaggagaagaaggagtacgccctgttctacaagcccgacatcgtgcccctgtccgagaccaacaacacctccgagtaccgcctgatcaactgcaacacctccgcctgcacccaggcctgccccaaggtgaccttcgagcccatccccatccactactgcgcccccgccggctacgccatcctgaagtgcaacgacgagaccttcaacggcaccggcccctgctccaacgtgtccaccgtgcagtgcacccacggcatccgccccgtggtgtccacccagctgctgctgaacggctccctggccgagaaggagatcgtgatccgctccgagaacctgaccaacaacgccaagatcatcatcgtgcacctgcacaagcccgtgacgatcgtgtgcacccgccccaacaacaacacccgcaagtccgtgcgcatcggccccggccagaccttctacgccaccggcgacatcatcggcgacatcaagcaggcccactgcaacatctccgaggagaagtggaacgacaccctgcagaaggtgggcatcgagctgcagaagcacttccccaacaagaccatcaagtacaaccagtccgccggcggcgacatggagatcaccacccactccttcaactgcggcggcgagttcttctactgcaacacctccaacctgttcaacggcacctacaacggcacctacatctccaccaactcctccgccaagtccacctccaccatcaccctgtactgccgcatcaagcagatcatcaacatgtggcagggcgtgggccgctgcatgtacgccccccccatcgccggcgccatcacctgccgctccaacatcaccggcctgctgctgacccgcgacggcggcaccaactccaacgagaccgagaccttccgccccgccggcggcgacatgcgcgacaactggcgctccgagctgtacaagtacaaggtggtgaagatcgagcccctgggcgtggcccccacccgctgcaagcgccgcgtggtgggccgccgccgccgccgccgcgccgtgggcatcggcgccgtgttcctgggcttcctgggcgccgccggctccaccatgggcgccgcctccatgaccctgaccgtgcaggcccgcaacctgctgtccggcatcgtgcagcagcagtccaacctgctgcgcgcccccgaggcccagcagcacctgctgaagctgaccgtgtggggcatcaagcagctgcaggcccgcgtgctggccgtggagcgctacctgcgcgaccagcagctgctgggcatctggggctgctccggcaagctgatctgctgcaccaacgtgccctggaactcctcctggtccaaccgcaacctgtccgagatctgggacaacatgacctggctgcagtgggacaaggagatctccaactacacccagatcatctacggcctgctggaggagtcccagaaccagcaggagaagaacgagcaggacctgctggccctggactgataagcggccgcggatcc

SEQ ID NO: 92 - protein, 646 aa, synthetic construct
MGSLQPLATLYLLGMLVASVLAAENLWVTVYYGVPVWKEAKTTLFCASDARAYEKEVHNVWATHACVPTDPSPQELVLGNVTENFNMWKNDMVDQMHEDIISLWDQSLKPCVKLTPLCVTLICSNATVKNGTVEEMKNCSFNTTTEIRDKEKKEYALFYKPDIVPLSETNNTSEYRLINCNTSACTQACPKVTFEPIPIHYCAPAGYAILKCNDETFNGTGPCSNVSTVQCTHGIRPVVSTQLLLNGSLAEKEIVIRSENLTNNAKIIIVHLHKPVTIVCTRPNNNTRKSVRIGPGQTFYATGDIIGDIKQAHCNISEEKWNDTLQKVGIELQKHFPNKTIKYNQSAGGDMEITTHSFNCGGEFFYCNTSNLFNGTYNGTYISTNSSAKSTSTITLYCRIKQIINMWQGVGRCMYAPPIAGAITCRSNITGLLLTRDGGTNSNETETFRPAGGDMRDNWRSELYKYKVVKIEPLGVAPTRCKRRVVGRRRRRRAVGIGAVFLGFLGAAGSTMGAASMTLTVQARNLLSGIVQQQSNLLRAPEAQQHLLKLTVWGIKQLQARVLAVERYLRDQQLLGIWGCSGKLICCTNVPWNSSWSNRNLSEIWDNMTWLQWDKEISNYTQIIYGLLEESQNQQEKNEQDLLALD

SEQ ID NO: 93 - DNA, 1981 bp, synthetic construct
  source 1..1981: mol_type = other DNA
gtcgacaagcttcccgggccaccatgggctccctgcagcccctggccaccctgtacctgctgggcatgctggtggcctccgtgctggccgccgagaacctgtgggtgaccgtgtactacggcgtgcccgtgtggaaggaggccaagaccaccctgttctgcgcctccgacgcccgcgcctacgagaaggaggtgcacaacgtgtgggccacccacgcctgcgtgcccaccgacccctccccccaggagctggtgctgggcaacgtgaccgagaacttcaacatgtggaagaacgacatggtggaccagatgcacgaggacatcatctccctgtgggaccagtccctgaagccctgcgtgaagctgacccccctgtgcgtgaccctgatctgctccgacgccaccgtgaagaccggcaccgtggaggagatgaagaactgctccttcaacaccaccaccgagatccgcgacaaggagaagaaggagtacgccctgttctacaagcccgacatcgtgcccctgtccgagaccaacaacacctccgagtaccgcctgatcaactgcaacacctccgcctgcacccaggcctgccccaaggtgaccttcgagcccatccccatccactactgcgcccccgccggctacgccatcctgaagtgcaacgacgagaccttcaacggcaccggcccctgctccaacgtgtccaccgtgcagtgcacccacggcatccgccccgtggtgtccacccagctgctgctgaacggctccctggccgagaaggagatcgtgatccgctccgagaacctgaccaacaacgccaagatcatcatcgtgcacctgcacacccccgtggagatcgtgtgcacccgccccaacaacaacacccgcaagtccgtgcgcatcggccccggccagaccttctacgccaccggcgacatcatcggcgacatcaagcaggcccactgcaacatctccgaggagaagtggaacgacaccctgcagaaggtgggcatcgagctgcagaagcacttccccaacaagaccatcaagtacaaccagtccgccggcggcgacatggagatcaccacccactccttcaactgcggcggcgagttcttctactgcaacacctccaacctgttcaacggcacctacaacggcacctacatctccaccaactcctccgccaactccacctccaccatcaccctgtactgccgcatcaagcagatcatcaacatgtggcagggcgtgggccgctgcatgtacgccccccccatcgccggcaacatcacctgccgctccaacatcaccggcctgctgctgacccgcgacggcggcaccaactccaacgagaccgagaccttccgccccgccggcggcgacatgcgcgacaactggcgctccgagctgtacaagtacaaggtggtgaagatcgagcccctgggcgtggcccccacccgctgcaagcgccgcgtggtgggccgccgccgccgccgccgcgccgtgggcatcggcgccgtgttcctgggcttcctgggcgccgccggctccaccatgggcgccgcctccatgaccctgaccgtgcaggcccgcaacctgctgtccggcatcgtgcagcagcagtccaacctgctgcgcgcccccgaggcccagcagcacctgctgaagctgaccgtgtggggcatcaagcagctgcaggcccgcgtgctggccgtggagcgctacctgcgcgaccagcagctgctgggcatctggggctgctccggcaagctgatctgctgcaccaacgtgccctggaactcctcctggtccaaccgcaacctgtccgagatctgggacaacatgacctggctgcagtgggacaaggagatctccaactacacccagatcatctacggcctgctggaggagtcccagaaccagcaggagaagaacgagcaggacctgctggccctggactgataagcggccgcggatcc

SEQ ID NO: 94 - protein, 646 aa, synthetic construct
MGSLQPLATLYLLGMLVASVLAAENLWVTVYYGVPVWKEAKTTLFCASDARAYEKEVHNVWATHACVPTDPSPQELVLGNVTENFNMWKNDMVDQMHEDIISLWDQSLKPCVKLTPLCVTLICSDATVKTGTVEEMKNCSFNTTTEIRDKEKKEYALFYKPDIVPLSETNNTSEYRLINCNTSACTQACPKVTFEPIPIHYCAPAGYAILKCNDETFNGTGPCSNVSTVQCTHGIRPVVSTQLLLNGSLAEKEIVIRSENLTNNAKIIIVHLHTPVEIVCTRPNNNTRKSVRIGPGQTFYATGDIIGDIKQAHCNISEEKWNDTLQKVGIELQKHFPNKTIKYNQSAGGDMEITTHSFNCGGEFFYCNTSNLFNGTYNGTYISTNSSANSTSTITLYCRIKQIINMWQGVGRCMYAPPIAGNITCRSNITGLLLTRDGGTNSNETETFRPAGGDMRDNWRSELYKYKVVKIEPLGVAPTRCKRRVVGRRRRRRAVGIGAVFLGFLGAAGSTMGAASMTLTVQARNLLSGIVQQQSNLLRAPEAQQHLLKLTVWGIKQLQARVLAVERYLRDQQLLGIWGCSGKLICCTNVPWNSSWSNRNLSEIWDNMTWLQWDKEISNYTQIIYGLLEESQNQQEKNEQDLLALD

SEQ ID NO: 95 - DNA, 1981 bp, synthetic construct
  source 1..1981: mol_type = other DNA
gtcgacaagcttcccgggccaccatgggctccctgcagcccctggccaccctgtacctgctgggcatgctggtggcctccgtgctggccgccgagaacctgtgggtgaccgtgtactacggcgtgcccgtgtggaaggaggccaagaccaccctgttctgcgcctccgacgcccgcgcctacgagaaggaggtgcacaacgtgtgggccacccacgcctgcgtgcccaccgacccctccccccaggagctggtgctgggcaacgtgaccgagaacttcaacatgtggaagaacgacatggtggaccagatgcacgaggacatcatctccctgtgggaccagtccctgaagccctgcgtgaagctgacccccctgtgcgtgaccctgatctgctccaacgccaccgtgaagaacggcaccgtggaggagatgaagaactgctccttcaacaccaccaccgagatccgcgacaaggagaagaaggagtacgccctgttctacaagcccgacatcgtgcccctgtccgagaccaacaacacctccgagtaccgcctgatcaactgcaacacctccgcctgcacccaggcctgccccaaggtgaccttcgagcccatccccatccactactgcgcccccgccggctacgccatcctgaagtgcaacgacgagaccttcaacggcaccggcccctgctccaacgtgtccaccgtgcagtgcacccacggcatccgccccgtggtgtccacccagctgctgctgaacggctccctggccgagaaggagatcgtgatccgctccgagaacctgaccaacaacgccaagatcatcatcgtgcacctgcacacccccgtggagatcgtgtgcacccgccccaacaacaacacccgcaagtccgtgcgcatcggccccggccagaccttctacgccaccggcgacatcatcggcgacatcaagcaggcccactgcaacatctccgaggagaagtggaacgacaccctgcagaaggtgggcatcgagctgcagaagcacttccccaacaagaccatcaagtacaaccagtccgccggcggcgacatggagatcaccacccactccttcaactgcggcggcgagttcttctactgcaacacctccaacctgttcaacggcacctacaacggcacctacatctccaccaactcctccgccaactccacctccaccatcaccctgcggtgccgcatcaagcagatcatcaacatgtggcagggcgtgggccgctgcatgtacgccccccccatcgccggcaacatcacctgccgctccaacatcaccggcctgctgctgacccgcgacggcggcaccaactccaacgagaccgagaccttccgccccgccggcggcgacatgcgcgacaactggcgctccgagctgtacaagtacaaggtggtgaagatcgagcccctgggcgtggcccccacccgctgcaagcgccgcgtggtgggccgccgccgccgccgccgcgccgtgggcatcggcgccgtgttcctgggcttcctgggcgccgccggctccaccatgggcgccgcctccatgaccctgaccgtgcaggcccgcaacctgctgtccggcatcgtgcagcagcagtccaacctgctgcgcgcccccgaggcccagcagcacctgctgaagctgaccgtgtggggcatcaagcagctgcaggcccgcgtgctggccgtggagcgctacctgcgcgaccagcagctgctgggcatctggggctgctccggcaagctgatctgctgcaccaacgtgccctggaactcctcctggtccaaccgcaacctgtccgagatctgggacaacatgacctggctgcagtgggacaaggagatctccaactacacccagatcatctacggcctgctggaggagtcccagaaccagcaggagaagaacgagcaggacctgctggccctggactgataagcggccgcggatcc

SEQ ID NO: 96 - protein, 646 aa, synthetic construct
MGSLQPLATLYLLGMLVASVLAAENLWVTVYYGVPVWKEAKTTLFCASDARAYEKEVHNVWATHACVPTDPSPQELVLGNVTENFNMWKNDMVDQMHEDIISLWDQSLKPCVKLTPLCVTLICSNATVKNGTVEEMKNCSFNTTTEIRDKEKKEYALFYKPDIVPLSETNNTSEYRLINCNTSACTQACPKVTFEPIPIHYCAPAGYAILKCNDETFNGTGPCSNVSTVQCTHGIRPVVSTQLLLNGSLAEKEIVIRSENLTNNAKIIIVHLHTPVEIVCTRPNNNTRKSVRIGPGQTFYATGDIIGDIKQAHCNISEEKWNDTLQKVGIELQKHFPNKTIKYNQSAGGDMEITTHSFNCGGEFFYCNTSNLFNGTYNGTYISTNSSANSTSTITLRCRIKQIINMWQGVGRCMYAPPIAGNITCRSNITGLLLTRDGGTNSNETETFRPAGGDMRDNWRSELYKYKVVKIEPLGVAPTRCKRRVVGRRRRRRAVGIGAVFLGFLGAAGSTMGAASMTLTVQARNLLSGIVQQQSNLLRAPEAQQHLLKLTVWGIKQLQARVLAVERYLRDQQLLGIWGCSGKLICCTNVPWNSSWSNRNLSEIWDNMTWLQWDKEISNYTQIIYGLLEESQNQQEKNEQDLLALD

SEQ ID NO: 97 - DNA, 1981 bp, synthetic construct
  source 1..1981: mol_type = other DNA
gtcgacaagcttcccgggccaccatgggctccctgcagcccctggccaccctgtacctgctgggcatgctggtggcctccgtgctggccgccgagaacctgtgggtgaccgtgtactacggcgtgcccgtgtggaaggaggccaagaccaccctgttctgcgcctccgacgcccgcgcctacgagaaggaggtgcacaacgtgtgggccacccacgcctgcgtgcccaccgacccctccccccaggagctggtgctgggcaacgtgaccgagaacttcaacatgtggaagaacgacatggtggaccagatgcacgaggacatcatctccctgtgggaccagtccctgaagccctgcgtgaagctgacccccctgtgcgtgaccctgatctgctccaacgccaccgtgaagaacggcaccgtggaggagatgaagaactgctccttcaacaccaccaccgagatccgcgacaaggagaagaaggagtacgccctgttctacaagcccgacatcgtgcccctgtccgagaccaacaacacctccgagtaccgcctgatcaactgcaacacctccgcctgcacccaggcctgccccaaggtgaccttcgagcccatccccatccactactgcgcccccgccggctacgccatcctgaagtgcaacgacgagaccttcaacggcaccggcccctgctccaacgtgtccaccgtgcagtgcacccacggcatccgccccgtggtgtccacccagctgctgctgaacggctccctggccgagaaggagatcgtgatccgctccgagaacctgaccaacaacgccaagatcatcatcgtgcacctgcacaagcccgtgacgatcgtgtgcacccgccccaacaacaacacccgcaagtccgtgcgcatcggccccggccagaccttctacgccaccggcgacatcatcggcgacatcaagcaggcccactgcaacatctccgaggagaagtggaacgacaccctgcagaaggtgggcatcgagctgcagaagcacttccccaacaagaccatcaagtacaaccagtccgccggcggcgacatggagatcaccacccactccttcaactgcggcggcgagttcttctactgcaacacctccaacctgttcaacggcacctacaacggcacctacatctccaccaactcctccgccaagtccacctccaccatcaccctgcggtgccgcatcaagcagatcatcaacatgtggcagggcgtgggccgctgcatgtacgccccccccatcgccggcgccatcacctgccgctccaacatcaccggcctgctgctgacccgcgacggcggcaccaactccaacgagaccgagaccttccgccccgccggcggcgacatgcgcgacaactggcgctccgagctgtacaagtacaaggtggtgaagatcgagcccctgggcgtggcccccacccgctgcaagcgccgcgtggtgggccgccgccgccgccgccgcgccgtgggcatcggcgccgtgttcctgggcttcctgggcgccgccggctccaccatgggcgccgcctccatgaccctgaccgtgcaggcccgcaacctgctgtccggcatcgtgcagcagcagtccaacctgctgcgcgcccccgaggcccagcagcacctgctgaagctgaccgtgtggggcatcaagcagctgcaggcccgcgtgctggccgtggagcgctacctgcgcgaccagcagctgctgggcatctggggctgctccggcaagctgatctgctgcaccaacgtgccctggaactcctcctggtccaaccgcaacctgtccgagatctgggacaacatgacctggctgcagtgggacaaggagatctccaactacacccagatcatctacggcctgctggaggagtcccagaaccagcaggagaagaacgagcaggacctgctggccctggactgataagcggccgcggatcc

SEQ ID NO: 98 - protein, 646 aa, synthetic construct
MGSLQPLATLYLLGMLVASVLAAENLWVTVYYGVPVWKEAKTTLFCASDARAYEKEVHNVWATHACVPTDPSPQELVLGNVTENFNMWKNDMVDQMHEDIISLWDQSLKPCVKLTPLCVTLICSNATVKNGTVEEMKNCSFNTTTEIRDKEKKEYALFYKPDIVPLSETNNTSEYRLINCNTSACTQACPKVTFEPIPIHYCAPAGYAILKCNDETFNGTGPCSNVSTVQCTHGIRPVVSTQLLLNGSLAEKEIVIRSENLTNNAKIIIVHLHKPVTIVCTRPNNNTRKSVRIGPGQTFYATGDIIGDIKQAHCNISEEKWNDTLQKVGIELQKHFPNKTIKYNQSAGGDMEITTHSFNCGGEFFYCNTSNLFNGTYNGTYISTNSSAKSTSTITLRCRIKQIINMWQGVGRCMYAPPIAGAITCRSNITGLLLTRDGGTNSNETETFRPAGGDMRDNWRSELYKYKVVKIEPLGVAPTRCKRRVVGRRRRRRAVGIGAVFLGFLGAAGSTMGAASMTLTVQARNLLSGIVQQQSNLLRAPEAQQHLLKLTVWGIKQLQARVLAVERYLRDQQLLGIWGCSGKLICCTNVPWNSSWSNRNLSEIWDNMTWLQWDKEISNYTQIIYGLLEESQNQQEKNEQDLLALD

SEQ ID NO: 99 - DNA, 1981 bp, synthetic construct
  source 1..1981: mol_type = other DNA
gtcgacaagcttcccgggccaccatgggctccctgcagcccctggccaccctgtacctgctgggcatgctggtggcctccgtgctggccgccgagaacctgtgggtgaccgtgtactacggcgtgcccgtgtggaaggaggccaagaccaccctgttctgcgcctccgacgcccgcgcctacgagaaggaggtgcacaacgtgtgggccacccacgcctgcgtgcccaccgacccctccccccaggagctggtgctgggcaacgtgaccgagaacttcaacatgtggaagaacgacatggtggaccagatgcacgaggacatcatctccctgtgggaccagtccctgaagccctgcgtgaagctgacccccctgtgcgtgaccctgatctgctccgacgccaccgtgaagaccggcaccgtggaggagatgaagaactgctccttcaacaccaccaccgagatccgcgacaaggagaagaaggagtacgccctgttctacaagcccgacatcgtgcccctgtccgagaccaacaacacctccgagtaccgcctgatcaactgcaacacctccgcctgcacccaggcctgccccaaggtgaccttcgagcccatccccatccactactgcgcccccgccggctacgccatcctgaagtgcaacgacgagaccttcaacggcaccggcccctgctccaacgtgtccaccgtgcagtgcacccacggcatccgccccgtggtgtccacccagctgctgctgaacggctccctggccgagaaggagatcgtgatccgctccgagaacctgaccaacaacgccaagatcatcatcgtgcacctgcacacccccgtggagatcgtgtgcacccgccccaacaacaacacccgcaagtccgtgcgcatcggccccggccagaccttctacgccaccggcgacatcatcggcgacatcaagcaggcccactgcaacatctccgaggagaagtggaacgacaccctgcagaaggtgggcatcgagctgcagaagcacttccccaacaagaccatcaagtacaaccagtccgccggcggcgacatggagatcaccacccactccttcaactgcggcggcgagttcttctactgcaacacctccaacctgttcaacggcacctacaacggcacctacatctccaccaactcctccgccaactccacctccaccatcaccctgcggtgccgcatcaagcagatcatcaacatgtggcagggcgtgggccgctgcatgtacgccccccccatcgccggcaacatcacctgccgctccaacatcaccggcctgctgctgacccgcgacggcggcaccaactccaacgagaccgagaccttccgccccgccggcggcgacatgcgcgacaactggcgctccgagctgtacaagtacaaggtggtgaagatcgagcccctgggcgtggcccccacccgctgcaagcgccgcgtggtgggccgccgccgccgccgccgcgccgtgggcatcggcgccgtgttcctgggcttcctgggcgccgccggctccaccatgggcgccgcctccatgaccctgaccgtgcaggcccgcaacctgctgtccggcatcgtgcagcagcagtccaacctgctgcgcgcccccgaggcccagcagcacctgctgaagctgaccgtgtggggcatcaagcagctgcaggcccgcgtgctggccgtggagcgctacctgcgcgaccagcagctgctgggcatctggggctgctccggcaagctgatctgctgcaccaacgtgccctggaactcctcctggtccaaccgcaacctgtccgagatctgggacaacatgacctggctgcagtgggacaaggagatctccaactacacccagatcatctacggcctgctggaggagtcccagaaccagcaggagaagaacgagcaggacctgctggccctggactgataagcggccgcggatcc

SEQ ID NO: 100 - protein, 646 aa, synthetic construct
MGSLQPLATLYLLGMLVASVLAAENLWVTVYYGVPVWKEAKTTLFCASDARAYEKEVHNVWATHACVPTDPSPQELVLGNVTENFNMWKNDMVDQMHEDIISLWDQSLKPCVKLTPLCVTLICSDATVKTGTVEEMKNCSFNTTTEIRDKEKKEYALFYKPDIVPLSETNNTSEYRLINCNTSACTQACPKVTFEPIPIHYCAPAGYAILKCNDETFNGTGPCSNVSTVQCTHGIRPVVSTQLLLNGSLAEKEIVIRSENLTNNAKIIIVHLHTPVEIVCTRPNNNTRKSVRIGPGQTFYATGDIIGDIKQAHCNISEEKWNDTLQKVGIELQKHFPNKTIKYNQSAGGDMEITTHSFNCGGEFFYCNTSNLFNGTYNGTYISTNSSANSTSTITLRCRIKQIINMWQGVGRCMYAPPIAGNITCRSNITGLLLTRDGGTNSNETETFRPAGGDMRDNWRSELYKYKVVKIEPLGVAPTRCKRRVVGRRRRRRAVGIGAVFLGFLGAAGSTMGAASMTLTVQARNLLSGIVQQQSNLLRAPEAQQHLLKLTVWGIKQLQARVLAVERYLRDQQLLGIWGCSGKLICCTNVPWNSSWSNRNLSEIWDNMTWLQWDKEISNYTQIIYGLLEESQNQQEKNEQDLLALD

SEQ ID NO: 101 - DNA, 1981 bp, synthetic construct
  source 1..1981: mol_type = other DNA
gtcgacaagcttcccgggccaccatgggctccctgcagcccctggccaccctgtacctgctgggcatgctggtggcctccgtgctggccgccgagaacctgtgggtgaccgtgtactacggcgtgcccgtgtggaaggaggccaagaccaccctgttctgcgcctccgacgcccgcgcctacgagaaggaggtgcacaacgtgtgggccacccacgcctgcgtgcccaccgacccctccccccaggagctggtgctgggcaacgtgaccgagaacttcaacatgtggaagaacgacatggtggaccagatgcacgaggacatcatctccctgtgggaccagtccctgaagccctgcgtgaagctgacccccctgtgcgtgaccctgatctgctccaacgccaccgtgaagaacggcaccgtggaggagatgaagaactgctccttcaacaccaccaccgagatccgcgacaaggagaagaaggagtacgccctgttctacaagcccgacatcgtgcccctgtccgagaccaacaacacctccgagtaccgcctgatcaactgcaacacctccgcctgcacccaggcctgccccaaggtgaccttcgagcccatccccatccactactgcgcccccgccggctacgccatcctgaagtgcaacgacgagaccttcaacggcaccggcccctgctccaacgtgtccaccgtgcagtgcacccacggcatccgccccgtggtgtccacccagctgctgctgaacggctccctggccgagaaggagatcgtgatccgctccgagaacctgaccaacaacgccaagatcatcatcgtgcacctgcacacccccgtggagatcgtgtgcacccgccccaacaacaacacccgcaagtccgtgcgcatcggccccggccagaccttctacgccaccggcgacatcatcggcgacatcaagcaggcccactgcaacatctccgaggagaagtggaacgacaccctgcagaaggtgggcatcgagctgcagaagcacttccccaacaagaccatcaagtacaaccagtccgccggcggcgacatggagatcaccacccactccttcaactgcggcggcgagttcttctactgcaacacctccaacctgttcaacggcacctacaacggcacctacatctccaccaactcctccgccaactccacctccaccatcaccctgaagtgccgcatcaagcagatcatcaacatgtggcagggcgtgggccgctgcatgtacgccccccccatcgccggcaacatcacctgccgctccaacatcaccggcctgctgctgacccgcgacggcggcaccaactccaacgagaccgagaccttccgccccgccggcggcgacatgcgcgacaactggcgctccgagctgtacaagtacaaggtggtgaagatcgagcccctgggcgtggcccccacccgctgcaagcgccgcgtggtgggccgccgccgccgccgccgcgccgtgggcatcggcgccgtgttcctgggcttcctgggcgccgccggctccaccatgggcgccgcctccatgaccctgaccgtgcaggcccgcaacctgctgtccggcatcgtgcagcagcagtccaacctgctgcgcgcccccgaggcccagcagcacctgctgaagctgaccgtgtggggcatcaagcagctgcaggcccgcgtgctggccgtggagcgctacctgcgcgaccagcagctgctgggcatctggggctgctccggcaagctgatctgctgcaccaacgtgccctggaactcctcctggtccaaccgcaacctgtccgagatctgggacaacatgacctggctgcagtgggacaaggagatctccaactacacccagatcatctacggcctgctggaggagtcccagaaccagcaggagaagaacgagcaggacctgctggccctggactgataagcggccgcggatcc

SEQ ID NO: 102 - protein, 646 aa, synthetic construct
MGSLQPLATLYLLGMLVASVLAAENLWVTVYYGVPVWKEAKTTLFCASDARAYEKEVHNVWATHACVPTDPSPQELVLGNVTENFNMWKNDMVDQMHEDIISLWDQSLKPCVKLTPLCVTLICSNATVKNGTVEEMKNCSFNTTTEIRDKEKKEYALFYKPDIVPLSETNNTSEYRLINCNTSACTQACPKVTFEPIPIHYCAPAGYAILKCNDETFNGTGPCSNVSTVQCTHGIRPVVSTQLLLNGSLAEKEIVIRSENLTNNAKIIIVHLHTPVEIVCTRPNNNTRKSVRIGPGQTFYATGDIIGDIKQAHCNISEEKWNDTLQKVGIELQKHFPNKTIKYNQSAGGDMEITTHSFNCGGEFFYCNTSNLFNGTYNGTYISTNSSANSTSTITLKCRIKQIINMWQGVGRCMYAPPIAGNITCRSNITGLLLTRDGGTNSNETETFRPAGGDMRDNWRSELYKYKVVKIEPLGVAPTRCKRRVVGRRRRRRAVGIGAVFLGFLGAAGSTMGAASMTLTVQARNLLSGIVQQQSNLLRAPEAQQHLLKLTVWGIKQLQARVLAVERYLRDQQLLGIWGCSGKLICCTNVPWNSSWSNRNLSEIWDNMTWLQWDKEISNYTQIIYGLLEESQNQQEKNEQDLLALD

SEQ ID NO: 103 - DNA, 1981 bp, synthetic construct
  source 1..1981: mol_type = other DNA
gtcgacaagcttcccgggccaccatgggctccctgcagcccctggccaccctgtacctgctgggcatgctggtggcctccgtgctggccgccgagaacctgtgggtgaccgtgtactacggcgtgcccgtgtggaaggaggccaagaccaccctgttctgcgcctccgacgcccgcgcctacgagaaggaggtgcacaacgtgtgggccacccacgcctgcgtgcccaccgacccctccccccaggagctggtgctgggcaacgtgaccgagaacttcaacatgtggaagaacgacatggtggaccagatgcacgaggacatcatctccctgtgggaccagtccctgaagccctgcgtgaagctgacccccctgtgcgtgaccctgatctgctccaacgccaccgtgaagaacggcaccgtggaggagatgaagaactgctccttcaacaccaccaccgagatccgcgacaaggagaagaaggagtacgccctgttctacaagcccgacatcgtgcccctgtccgagaccaacaacacctccgagtaccgcctgatcaactgcaacacctccgcctgcacccaggcctgccccaaggtgaccttcgagcccatccccatccactactgcgcccccgccggctacgccatcctgaagtgcaacgacgagaccttcaacggcaccggcccctgctccaacgtgtccaccgtgcagtgcacccacggcatccgccccgtggtgtccacccagctgctgctgaacggctccctggccgagaaggagatcgtgatccgctccgagaacctgaccaacaacgccaagatcatcatcgtgcacctgcacaagcccgtgacgatcgtgtgcacccgccccaacaacaacacccgcaagtccgtgcgcatcggccccggccagaccttctacgccaccggcgacatcatcggcgacatcaagcaggcccactgcaacatctccgaggagaagtggaacgacaccctgcagaaggtgggcatcgagctgcagaagcacttccccaacaagaccatcaagtacaaccagtccgccggcggcgacatggagatcaccacccactccttcaactgcggcggcgagttcttctactgcaacacctccaacctgttcaacggcacctacaacggcacctacatctccaccaactcctccgccaagtccacctccaccatcaccctgaagtgccgcatcaagcagatcatcaacatgtggcagggcgtgggccgctgcatgtacgccccccccatcgccggcgccatcacctgccgctccaacatcaccggcctgctgctgacccgcgacggcggcaccaactccaacgagaccgagaccttccgccccgccggcggcgacatgcgcgacaactggcgctccgagctgtacaagtacaaggtggtgaagatcgagcccctgggcgtggcccccacccgctgcaagcgccgcgtggtgggccgccgccgccgccgccgcgccgtgggcatcggcgccgtgttcctgggcttcctgggcgccgccggctccaccatgggcgccgcctccatgaccctgaccgtgcaggcccgcaacctgctgtccggcatcgtgcagcagcagtccaacctgctgcgcgcccccgaggcccagcagcacctgctgaagctgaccgtgtggggcatcaagcagctgcaggcccgcgtgctggccgtggagcgctacctgcgcgaccagcagctgctgggcatctggggctgctccggcaagctgatctgctgcaccaacgtgccctggaactcctcctggtccaaccgcaacctgtccgagatctgggacaacatgacctggctgcagtgggacaaggagatctccaactacacccagatcatctacggcctgctggaggagtcccagaaccagcaggagaagaacgagcaggacctgctggccctggactgataagcggccgcggatcc

SEQ ID NO: 104 - protein, 646 aa, synthetic construct
MGSLQPLATLYLLGMLVASVLAAENLWVTVYYGVPVWKEAKTTLFCASDARAYEKEVHNVWATHACVPTDPSPQELVLGNVTENFNMWKNDMVDQMHEDIISLWDQSLKPCVKLTPLCVTLICSNATVKNGTVEEMKNCSFNTTTEIRDKEKKEYALFYKPDIVPLSETNNTSEYRLINCNTSACTQACPKVTFEPIPIHYCAPAGYAILKCNDETFNGTGPCSNVSTVQCTHGIRPVVSTQLLLNGSLAEKEIVIRSENLTNNAKIIIVHLHKPVTIVCTRPNNNTRKSVRIGPGQTFYATGDIIGDIKQAHCNISEEKWNDTLQKVGIELQKHFPNKTIKYNQSAGGDMEITTHSFNCGGEFFYCNTSNLFNGTYNGTYISTNSSAKSTSTITLKCRIKQIINMWQGVGRCMYAPPIAGAITCRSNITGLLLTRDGGTNSNETETFRPAGGDMRDNWRSELYKYKVVKIEPLGVAPTRCKRRVVGRRRRRRAVGIGAVFLGFLGAAGSTMGAASMTLTVQARNLLSGIVQQQSNLLRAPEAQQHLLKLTVWGIKQLQARVLAVERYLRDQQLLGIWGCSGKLICCTNVPWNSSWSNRNLSEIWDNMTWLQWDKEISNYTQIIYGLLEESQNQQEKNEQDLLALD

SEQ ID NO: 105 - DNA, 1981 bp, synthetic construct
  source 1..1981: mol_type = other DNA
gtcgacaagcttcccgggccaccatgggctccctgcagcccctggccaccctgtacctgctgggcatgctggtggcctccgtgctggccgccgagaacctgtgggtgaccgtgtactacggcgtgcccgtgtggaaggaggccaagaccaccctgttctgcgcctccgacgcccgcgcctacgagaaggaggtgcacaacgtgtgggccacccacgcctgcgtgcccaccgacccctccccccaggagctggtgctgggcaacgtgaccgagaacttcaacatgtggaagaacgacatggtggaccagatgcacgaggacatcatctccctgtgggaccagtccctgaagccctgcgtgaagctgacccccctgtgcgtgaccctgatctgctccgacgccaccgtgaagaccggcaccgtggaggagatgaagaactgctccttcaacaccaccaccgagatccgcgacaaggagaagaaggagtacgccctgttctacaagcccgacatcgtgcccctgtccgagaccaacaacacctccgagtaccgcctgatcaactgcaacacctccgcctgcacccaggcctgccccaaggtgaccttcgagcccatccccatccactactgcgcccccgccggctacgccatcctgaagtgcaacgacgagaccttcaacggcaccggcccctgctccaacgtgtccaccgtgcagtgcacccacggcatccgccccgtggtgtccacccagctgctgctgaacggctccctggccgagaaggagatcgtgatccgctccgagaacctgaccaacaacgccaagatcatcatcgtgcacctgcacacccccgtggagatcgtgtgcacccgccccaacaacaacacccgcaagtccgtgcgcatcggccccggccagaccttctacgccaccggcgacatcatcggcgacatcaagcaggcccactgcaacatctccgaggagaagtggaacgacaccctgcagaaggtgggcatcgagctgcagaagcacttccccaacaagaccatcaagtacaaccagtccgccggcggcgacatggagatcaccacccactccttcaactgcggcggcgagttcttctactgcaacacctccaacctgttcaacggcacctacaacggcacctacatctccaccaactcctccgccaactccacctccaccatcaccctgaagtgccgcatcaagcagatcatcaacatgtggcagggcgtgggccgctgcatgtacgccccccccatcgccggcaacatcacctgccgctccaacatcaccggcctgctgctgacccgcgacggcggcaccaactccaacgagaccgagaccttccgccccgccggcggcgacatgcgcgacaactggcgctccgagctgtacaagtacaaggtggtgaagatcgagcccctgggcgtggcccccacccgctgcaagcgccgcgtggtgggccgccgccgccgccgccgcgccgtgggcatcggcgccgtgttcctgggcttcctgggcgccgccggctccaccatgggcgccgcctccatgaccctgaccgtgcaggcccgcaacctgctgtccggcatcgtgcagcagcagtccaacctgctgcgcgcccccgaggcccagcagcacctgctgaagctgaccgtgtggggcatcaagcagctgcaggcccgcgtgctggccgtggagcgctacctgcgcgaccagcagctgctgggcatctggggctgctccggcaagctgatctgctgcaccaacgtgccctggaactcctcctggtccaaccgcaacctgtccgagatctgggacaacatgacctggctgcagtgggacaaggagatctccaactacacccagatcatctacggcctgctggaggagtcccagaaccagcaggagaagaacgagcaggacctgctggccctggactgataagcggccgcggatcc

SEQ ID NO: 106 - protein, 646 aa, synthetic construct
MGSLQPLATLYLLGMLVASVLAAENLWVTVYYGVPVWKEAKTTLFCASDARAYEKEVHNVWATHACVPTDPSPQELVLGNVTENFNMWKNDMVDQMHEDIISLWDQSLKPCVKLTPLCVTLICSDATVKTGTVEEMKNCSFNTTTEIRDKEKKEYALFYKPDIVPLSETNNTSEYRLINCNTSACTQACPKVTFEPIPIHYCAPAGYAILKCNDETFNGTGPCSNVSTVQCTHGIRPVVSTQLLLNGSLAEKEIVIRSENLTNNAKIIIVHLHTPVEIVCTRPNNNTRKSVRIGPGQTFYATGDIIGDIKQAHCNISEEKWNDTLQKVGIELQKHFPNKTIKYNQSAGGDMEITTHSFNCGGEFFYCNTSNLFNGTYNGTYISTNSSANSTSTITLKCRIKQIINMWQGVGRCMYAPPIAGNITCRSNITGLLLTRDGGTNSNETETFRPAGGDMRDNWRSELYKYKVVKIEPLGVAPTRCKRRVVGRRRRRRAVGIGAVFLGFLGAAGSTMGAASMTLTVQARNLLSGIVQQQSNLLRAPEAQQHLLKLTVWGIKQLQARVLAVERYLRDQQLLGIWGCSGKLICCTNVPWNSSWSNRNLSEIWDNMTWLQWDKEISNYTQIIYGLLEESQNQQEKNEQDLLALD

SEQ ID NO: 107 - DNA, 1981 bp, synthetic construct
  source 1..1981: mol_type = other DNA
gtcgacaagcttcccgggccaccatgggctccctgcagcccctggccaccctgtacctgctgggcatgctggtggcctccgtgctggccgccgagaacctgtgggtgaccgtgtactacggcgtgcccgtgtggaaggaggccaagaccaccctgttctgcgcctccgacgcccgcgcctacgagaaggaggtgcacaacgtgtgggccacccacgcctgcgtgcccaccgacccctccccccaggagctggtgctgggcaacgtgaccgagaacttcaacatgtggaagaacgacatggtggaccagatgcacgaggacatcatctccctgtgggaccagtccctgaagccctgcgtgaagctgacccccctgtgcgtgaccctgatctgctccaacgccaccgtgaagaacggcaccgtggaggagatgaagaactgctccttcaacaccaccaccgagatccgcgacaaggagaagaaggagtacgccctgttctacaagcccgacatcgtgcccctgtccgagaccaacaacacctccgagtaccgcctgatcaactgcaacacctccgcctgcacccaggcctgccccaaggtgaccttcgagcccatccccatccactactgcgcccccgccggctacgccatcctgaagtgcaacgacgagaccttcaacggcaccggcccctgctccaacgtgtccaccgtgcagtgcacccacggcatccgccccgtggtgtccacccagctgctgctgaacggctccctggccgagaaggagatcgtgatccgctccgagaacctgaccaacaacgccaagatcatcatcgtgcacctgcacacccccgtggagatcgtgtgcacccgccccaacaacaacacccgcaagtccgtgcgcatcggccccggccagaccttctacgccaccggcgacatcatcggcgacatcaagcaggccgcctgcaacatctccgaggagaagtggaacgacaccctgcagaaggtgggcatcgagctgcagaagcacttccccaacaagaccatcaagtacaaccagtccgccggcggcgacatggagatcaccacccactccttcaactgcggcggcgagttcttctactgcaacacctccaacctgttcaacggcacctacaacggcacctacatctccaccaactcctccgccaactccacctccaccatcaccctgcagtgccgcatcaagcagatcatcaacatgtggcagggcgtgggccgctgcatgtacgccccccccatcgccggcaacatcacctgccgctccaacatcaccggcctgctgctgacccgcgacggcggcaccaactccaacgagaccgagaccttccgccccgccggcggcgacatgcgcgacaactggcgctccgagctgtacaagtacaaggtggtgaagatcgagcccctgggcgtggcccccacccgctgcaagcgccgcgtggtgggccgccgccgccgccgccgcgccgtgggcatcggcgccgtgttcctgggcttcctgggcgccgccggctccaccatgggcgccgcctccatgaccctgaccgtgcaggcccgcaacctgctgtccggcatcgtgcagcagcagtccaacctgctgcgcgcccccgaggcccagcagcacctgctgaagctgaccgtgtggggcatcaagcagctgcaggcccgcgtgctggccgtggagcgctacctgcgcgaccagcagctgctgggcatctggggctgctccggcaagctgatctgctgcaccaacgtgccctggaactcctcctggtccaaccgcaacctgtccgagatctgggacaacatgacctggctgcagtgggacaaggagatctccaactacacccagatcatctacggcctgctggaggagtcccagaaccagcaggagaagaacgagcaggacctgctggccctggactgataagcggccgcggatcc

SEQ ID NO: 108 - protein, 646 aa, synthetic construct
MGSLQPLATLYLLGMLVASVLAAENLWVTVYYGVPVWKEAKTTLFCASDARAYEKEVHNVWATHACVPTDPSPQELVLGNVTENFNMWKNDMVDQMHEDIISLWDQSLKPCVKLTPLCVTLICSNATVKNGTVEEMKNCSFNTTTEIRDKEKKEYALFYKPDIVPLSETNNTSEYRLINCNTSACTQACPKVTFEPIPIHYCAPAGYAILKCNDETFNGTGPCSNVSTVQCTHGIRPVVSTQLLLNGSLAEKEIVIRSENLTNNAKIIIVHLHTPVEIVCTRPNNNTRKSVRIGPGQTFYATGDIIGDIKQAACNISEEKWNDTLQKVGIELQKHFPNKTIKYNQSAGGDMEITTHSFNCGGEFFYCNTSNLFNGTYNGTYISTNSSANSTSTITLQCRIKQIINMWQGVGRCMYAPPIAGNITCRSNITGLLLTRDGGTNSNETETFRPAGGDMRDNWRSELYKYKVVKIEPLGVAPTRCKRRVVGRRRRRRAVGIGAVFLGFLGAAGSTMGAASMTLTVQARNLLSGIVQQQSNLLRAPEAQQHLLKLTVWGIKQLQARVLAVERYLRDQQLLGIWGCSGKLICCTNVPWNSSWSNRNLSEIWDNMTWLQWDKEISNYTQIIYGLLEESQNQQEKNEQDLLALD

SEQ ID NO: 109 - DNA, 1981 bp, synthetic construct
  source 1..1981: mol_type = other DNA
gtcgacaagcttcccgggccaccatgggctccctgcagcccctggccaccctgtacctgctgggcatgctggtggcctccgtgctggccgccgagaacctgtgggtgaccgtgtactacggcgtgcccgtgtggaaggaggccaagaccaccctgttctgcgcctccgacgcccgcgcctacgagaaggaggtgcacaacgtgtgggccacccacgcctgcgtgcccaccgacccctccccccaggagctggtgctgggcaacgtgaccgagaacttcaacatgtggaagaacgacatggtggaccagatgcacgaggacatcatctccctgtgggaccagtccctgaagccctgcgtgaagctgacccccctgtgcgtgaccctgatctgctccaacgccaccgtgaagaacggcaccgtggaggagatgaagaactgctccttcaacaccaccaccgagatccgcgacaaggagaagaaggagtacgccctgttctacaagcccgacatcgtgcccctgtccgagaccaacaacacctccgagtaccgcctgatcaactgcaacacctccgcctgcacccaggcctgccccaaggtgaccttcgagcccatccccatccactactgcgcccccgccggctacgccatcctgaagtgcaacgacgagaccttcaacggcaccggcccctgctccaacgtgtccaccgtgcagtgcacccacggcatccgccccgtggtgtccacccagctgctgctgaacggctccctggccgagaaggagatcgtgatccgctccgagaacctgaccaacaacgccaagatcatcatcgtgcacctgcacaagcccgtgacgatcgtgtgcacccgccccaacaacaacacccgcaagtccgtgcgcatcggccccggccagaccttctacgccaccggcgacatcatcggcgacatcaagcaggccgcctgcaacatctccgaggagaagtggaacgacaccctgcagaaggtgggcatcgagctgcagaagcacttccccaacaagaccatcaagtacaaccagtccgccggcggcgacatggagatcaccacccactccttcaactgcggcggcgagttcttctactgcaacacctccaacctgttcaacggcacctacaacggcacctacatctccaccaactcctccgccaagtccacctccaccatcaccctgcagtgccgcatcaagcagatcatcaacatgtggcagggcgtgggccgctgcatgtacgccccccccatcgccggcgccatcacctgccgctccaacatcaccggcctgctgctgacccgcgacggcggcaccaactccaacgagaccgagaccttccgccccgccggcggcgacatgcgcgacaactggcgctccgagctgtacaagtacaaggtggtgaagatcgagcccctgggcgtggcccccacccgctgcaagcgccgcgtggtgggccgccgccgccgccgccgcgccgtgggcatcggcgccgtgttcctgggcttcctgggcgccgccggctccaccatgggcgccgcctccatgaccctgaccgtgcaggcccgcaacctgctgtccggcatcgtgcagcagcagtccaacctgctgcgcgcccccgaggcccagcagcacctgctgaagctgaccgtgtggggcatcaagcagctgcaggcccgcgtgctggccgtggagcgctacctgcgcgaccagcagctgctgggcatctggggctgctccggcaagctgatctgctgcaccaacgtgccctggaactcctcctggtccaaccgcaacctgtccgagatctgggacaacatgacctggctgcagtgggacaaggagatctccaactacacccagatcatctacggcctgctggaggagtcccagaaccagcaggagaagaacgagcaggacctgctggccctggactgataagcggccgcggatcc

SEQ ID NO: 110 - protein, 646 aa, synthetic construct
MGSLQPLATLYLLGMLVASVLAAENLWVTVYYGVPVWKEAKTTLFCASDARAYEKEVHNVWATHACVPTDPSPQELVLGNVTENFNMWKNDMVDQMHEDIISLWDQSLKPCVKLTPLCVTLICSNATVKNGTVEEMKNCSFNTTTEIRDKEKKEYALFYKPDIVPLSETNNTSEYRLINCNTSACTQACPKVTFEPIPIHYCAPAGYAILKCNDETFNGTGPCSNVSTVQCTHGIRPVVSTQLLLNGSLAEKEIVIRSENLTNNAKIIIVHLHKPVTIVCTRPNNNTRKSVRIGPGQTFYATGDIIGDIKQAACNISEEKWNDTLQKVGIELQKHFPNKTIKYNQSAGGDMEITTHSFNCGGEFFYCNTSNLFNGTYNGTYISTNSSAKSTSTITLQCRIKQIINMWQGVGRCMYAPPIAGAITCRSNITGLLLTRDGGTNSNETETFRPAGGDMRDNWRSELYKYKVVKIEPLGVAPTRCKRRVVGRRRRRRAVGIGAVFLGFLGAAGSTMGAASMTLTVQARNLLSGIVQQQSNLLRAPEAQQHLLKLTVWGIKQLQARVLAVERYLRDQQLLGIWGCSGKLICCTNVPWNSSWSNRNLSEIWDNMTWLQWDKEISNYTQIIYGLLEESQNQQEKNEQDLLALD

SEQ ID NO: 111 - DNA, 1981 bp, synthetic construct
  source 1..1981: mol_type = other DNA
gtcgacaagcttcccgggccaccatgggctccctgcagcccctggccaccctgtacctgctgggcatgctggtggcctccgtgctggccgccgagaacctgtgggtgaccgtgtactacggcgtgcccgtgtggaaggaggccaagaccaccctgttctgcgcctccgacgcccgcgcctacgagaaggaggtgcacaacgtgtgggccacccacgcctgcgtgcccaccgacccctccccccaggagctggtgctgggcaacgtgaccgagaacttcaacatgtggaagaacgacatggtggaccagatgcacgaggacatcatctccctgtgggaccagtccctgaagccctgcgtgaagctgacccccctgtgcgtgaccctgatctgctccgacgccaccgtgaagaccggcaccgtggaggagatgaagaactgctccttcaacaccaccaccgagatccgcgacaaggagaagaaggagtacgccctgttctacaagcccgacatcgtgcccctgtccgagaccaacaacacctccgagtaccgcctgatcaactgcaacacctccgcctgcacccaggcctgccccaaggtgaccttcgagcccatccccatccactactgcgcccccgccggctacgccatcctgaagtgcaacgacgagaccttcaacggcaccggcccctgctccaacgtgtccaccgtgcagtgcacccacggcatccgccccgtggtgtccacccagctgctgctgaacggctccctggccgagaaggagatcgtgatccgctccgagaacctgaccaacaacgccaagatcatcatcgtgcacctgcacacccccgtggagatcgtgtgcacccgccccaacaacaacacccgcaagtccgtgcgcatcggccccggccagaccttctacgccaccggcgacatcatcggcgacatcaagcaggccgcctgcaacatctccgaggagaagtggaacgacaccctgcagaaggtgggcatcgagctgcagaagcacttccccaacaagaccatcaagtacaaccagtccgccggcggcgacatggagatcaccacccactccttcaactgcggcggcgagttcttctactgcaacacctccaacctgttcaacggcacctacaacggcacctacatctccaccaactcctccgccaactccacctccaccatcaccctgcagtgccgcatcaagcagatcatcaacatgtggcagggcgtgggccgctgcatgtacgccccccccatcgccggcaacatcacctgccgctccaacatcaccggcctgctgctgacccgcgacggcggcaccaactccaacgagaccgagaccttccgccccgccggcggcgacatgcgcgacaactggcgctccgagctgtacaagtacaaggtggtgaagatcgagcccctgggcgtggcccccacccgctgcaagcgccgcgtggtgggccgccgccgccgccgccgcgccgtgggcatcggcgccgtgttcctgggcttcctgggcgccgccggctccaccatgggcgccgcctccatgaccctgaccgtgcaggcccgcaacctgctgtccggcatcgtgcagcagcagtccaacctgctgcgcgcccccgaggcccagcagcacctgctgaagctgaccgtgtggggcatcaagcagctgcaggcccgcgtgctggccgtggagcgctacctgcgcgaccagcagctgctgggcatctggggctgctccggcaagctgatctgctgcaccaacgtgccctggaactcctcctggtccaaccgcaacctgtccgagatctgggacaacatgacctggctgcagtgggacaaggagatctccaactacacccagatcatctacggcctgctggaggagtcccagaaccagcaggagaagaacgagcaggacctgctggccctggactgataagcggccgcggatcc

SEQ ID NO: 112 - protein, 646 aa, synthetic construct
MGSLQPLATLYLLGMLVASVLAAENLWVTVYYGVPVWKEAKTTLFCASDARAYEKEVHNVWATHACVPTDPSPQELVLGNVTENFNMWKNDMVDQMHEDIISLWDQSLKPCVKLTPLCVTLICSDATVKTGTVEEMKNCSFNTTTEIRDKEKKEYALFYKPDIVPLSETNNTSEYRLINCNTSACTQACPKVTFEPIPIHYCAPAGYAILKCNDETFNGTGPCSNVSTVQCTHGIRPVVSTQLLLNGSLAEKEIVIRSENLTNNAKIIIVHLHTPVEIVCTRPNNNTRKSVRIGPGQTFYATGDIIGDIKQAACNISEEKWNDTLQKVGIELQKHFPNKTIKYNQSAGGDMEITTHSFNCGGEFFYCNTSNLFNGTYNGTYISTNSSANSTSTITLQCRIKQIINMWQGVGRCMYAPPIAGNITCRSNITGLLLTRDGGTNSNETETFRPAGGDMRDNWRSELYKYKVVKIEPLGVAPTRCKRRVVGRRRRRRAVGIGAVFLGFLGAAGSTMGAASMTLTVQARNLLSGIVQQQSNLLRAPEAQQHLLKLTVWGIKQLQARVLAVERYLRDQQLLGIWGCSGKLICCTNVPWNSSWSNRNLSEIWDNMTWLQWDKEISNYTQIIYGLLEESQNQQEKNEQDLLALD

SEQ ID NO: 113 - DNA, 1981 bp, synthetic construct
  source 1..1981: mol_type = other DNA
gtcgacaagcttcccgggccaccatgggctccctgcagcccctggccaccctgtacctgctgggcatgctggtggcctccgtgctggccgccgagaacctgtgggtgaccgtgtactacggcgtgcccgtgtggaaggaggccaagaccaccctgttctgcgcctccgacgcccgcgcctacgagaaggaggtgcacaacgtgtgggccacccacgcctgcgtgcccaccgacccctccccccaggagctggtgctgggcaacgtgaccgagaacttcaacatgtggaagaacgacatggtggaccagatgcacgaggacatcatctccctgtgggaccagtccctgaagccctgcgtgaagctgacccccctgtgcgtgaccctgatctgctccaacgccaccgtgaagaacggcaccgtggaggagatgaagaactgctccttcaacaccaccaccgagatccgcgacaaggagaagaaggagtacgccctgttctacaagcccgacatcgtgcccctgtccgagaccaacaacacctccgagtaccgcctgatcaactgcaacacctccgcctgcacccaggcctgccccaaggtgaccttcgagcccatccccatccactactgcgcccccgccggctacgccatcctgaagtgcaacgacgagaccttcaacggcaccggcccctgctccaacgtgtccaccgtgcagtgcacccacggcatccgccccgtggtgtccacccagctgctgctgaacggctccctggccgagaaggagatcgtgatccgctccgagaacctgaccaacaacgccaagatcatcatcgtgcacctgcacacccccgtggagatcgtgtgcacccgccccaacaacaacacccgcaagtccgtgcgcatcggccccggccagaccttctacgccaccggcgacatcatcggcgacatcaagcaggcctggtgcaacatctccgaggagaagtggaacgacaccctgcagaaggtgggcatcgagctgcagaagcacttccccaacaagaccatcaagtacaaccagtccgccggcggcgacatggagatcaccacccactccttcaactgcggcggcgagttcttctactgcaacacctccaacctgttcaacggcacctacaacggcacctacatctccaccaactcctccgccaactccacctccaccatcaccctgcagtgccgcatcaagcagatcatcaacatgtggcagggcgtgggccgctgcatgtacgccccccccatcgccggcaacatcacctgccgctccaacatcaccggcctgctgctgacccgcgacggcggcaccaactccaacgagaccgagaccttccgccccgccggcggcgacatgcgcgacaactggcgctccgagctgtacaagtacaaggtggtgaagatcgagcccctgggcgtggcccccacccgctgcaagcgccgcgtggtgggccgccgccgccgccgccgcgccgtgggcatcggcgccgtgttcctgggcttcctgggcgccgccggctccaccatgggcgccgcctccatgaccctgaccgtgcaggcccgcaacctgctgtccggcatcgtgcagcagcagtccaacctgctgcgcgcccccgaggcccagcagcacctgctgaagctgaccgtgtggggcatcaagcagctgcaggcccgcgtgctggccgtggagcgctacctgcgcgaccagcagctgctgggcatctggggctgctccggcaagctgatctgctgcaccaacgtgccctggaactcctcctggtccaaccgcaacctgtccgagatctgggacaacatgacctggctgcagtgggacaaggagatctccaactacacccagatcatctacggcctgctggaggagtcccagaaccagcaggagaagaacgagcaggacctgctggccctggactgataagcggccgcggatcc

SEQ ID NO: 114 - protein, 646 aa, synthetic construct
MGSLQPLATLYLLGMLVASVLAAENLWVTVYYGVPVWKEAKTTLFCASDARAYEKEVHNVWATHACVPTDPSPQELVLGNVTENFNMWKNDMVDQMHEDIISLWDQSLKPCVKLTPLCVTLICSNATVKNGTVEEMKNCSFNTTTEIRDKEKKEYALFYKPDIVPLSETNNTSEYRLINCNTSACTQACPKVTFEPIPIHYCAPAGYAILKCNDETFNGTGPCSNVSTVQCTHGIRPVVSTQLLLNGSLAEKEIVIRSENLTNNAKIIIVHLHTPVEIVCTRPNNNTRKSVRIGPGQTFYATGDIIGDIKQAWCNISEEKWNDTLQKVGIELQKHFPNKTIKYNQSAGGDMEITTHSFNCGGEFFYCNTSNLFNGTYNGTYISTNSSANSTSTITLQCRIKQIINMWQGVGRCMYAPPIAGNITCRSNITGLLLTRDGGTNSNETETFRPAGGDMRDNWRSELYKYKVVKIEPLGVAPTRCKRRVVGRRRRRRAVGIGAVFLGFLGAAGSTMGAASMTLTVQARNLLSGIVQQQSNLLRAPEAQQHLLKLTVWGIKQLQARVLAVERYLRDQQLLGIWGCSGKLICCTNVPWNSSWSNRNLSEIWDNMTWLQWDKEISNYTQIIYGLLEESQNQQEKNEQDLLALD

SEQ ID NO: 115 - DNA, 1981 bp, synthetic construct
  source 1..1981: mol_type = other DNA
gtcgacaagcttcccgggccaccatgggctccctgcagcccctggccaccctgtacctgctgggcatgctggtggcctccgtgctggccgccgagaacctgtgggtgaccgtgtactacggcgtgcccgtgtggaaggaggccaagaccaccctgttctgcgcctccgacgcccgcgcctacgagaaggaggtgcacaacgtgtgggccacccacgcctgcgtgcccaccgacccctccccccaggagctggtgctgggcaacgtgaccgagaacttcaacatgtggaagaacgacatggtggaccagatgcacgaggacatcatctccctgtgggaccagtccctgaagccctgcgtgaagctgacccccctgtgcgtgaccctgatctgctccaacgccaccgtgaagaacggcaccgtggaggagatgaagaactgctccttcaacaccaccaccgagatccgcgacaaggagaagaaggagtacgccctgttctacaagcccgacatcgtgcccctgtccgagaccaacaacacctccgagtaccgcctgatcaactgcaacacctccgcctgcacccaggcctgccccaaggtgaccttcgagcccatccccatccactactgcgcccccgccggctacgccatcctgaagtgcaacgacgagaccttcaacggcaccggcccctgctccaacgtgtccaccgtgcagtgcacccacggcatccgccccgtggtgtccacccagctgctgctgaacggctccctggccgagaaggagatcgtgatccgctccgagaacctgaccaacaacgccaagatcatcatcgtgcacctgcacaagcccgtgacgatcgtgtgcacccgccccaacaacaacacccgcaagtccgtgcgcatcggccccggccagaccttctacgccaccggcgacatcatcggcgacatcaagcaggcctggtgcaacatctccgaggagaagtggaacgacaccctgcagaaggtgggcatcgagctgcagaagcacttccccaacaagaccatcaagtacaaccagtccgccggcggcgacatggagatcaccacccactccttcaactgcggcggcgagttcttctactgcaacacctccaacctgttcaacggcacctacaacggcacctacatctccaccaactcctccgccaagtccacctccaccatcaccctgcagtgccgcatcaagcagatcatcaacatgtggcagggcgtgggccgctgcatgtacgccccccccatcgccggcgccatcacctgccgctccaacatcaccggcctgctgctgacccgcgacggcggcaccaactccaacgagaccgagaccttccgccccgccggcggcgacatgcgcgacaactggcgctccgagctgtacaagtacaaggtggtgaagatcgagcccctgggcgtggcccccacccgctgcaagcgccgcgtggtgggccgccgccgccgccgccgcgccgtgggcatcggcgccgtgttcctgggcttcctgggcgccgccggctccaccatgggcgccgcctccatgaccctgaccgtgcaggcccgcaacctgctgtccggcatcgtgcagcagcagtccaacctgctgcgcgcccccgaggcccagcagcacctgctgaagctgaccgtgtggggcatcaagcagctgcaggcccgcgtgctggccgtggagcgctacctgcgcgaccagcagctgctgggcatctggggctgctccggcaagctgatctgctgcaccaacgtgccctggaactcctcctggtccaaccgcaacctgtccgagatctgggacaacatgacctggctgcagtgggacaaggagatctccaactacacccagatcatctacggcctgctggaggagtcccagaaccagcaggagaagaacgagcaggacctgctggccctggactgataagcggccgcggatcc

SEQ ID NO: 116 - protein, 646 aa, synthetic construct
MGSLQPLATLYLLGMLVASVLAAENLWVTVYYGVPVWKEAKTTLFCASDARAYEKEVHNVWATHACVPTDPSPQELVLGNVTENFNMWKNDMVDQMHEDIISLWDQSLKPCVKLTPLCVTLICSNATVKNGTVEEMKNCSFNTTTEIRDKEKKEYALFYKPDIVPLSETNNTSEYRLINCNTSACTQACPKVTFEPIPIHYCAPAGYAILKCNDETFNGTGPCSNVSTVQCTHGIRPVVSTQLLLNGSLAEKEIVIRSENLTNNAKIIIVHLHKPVTIVCTRPNNNTRKSVRIGPGQTFYATGDIIGDIKQAWCNISEEKWNDTLQKVGIELQKHFPNKTIKYNQSAGGDMEITTHSFNCGGEFFYCNTSNLFNGTYNGTYISTNSSAKSTSTITLQCRIKQIINMWQGVGRCMYAPPIAGAITCRSNITGLLLTRDGGTNSNETETFRPAGGDMRDNWRSELYKYKVVKIEPLGVAPTRCKRRVVGRRRRRRAVGIGAVFLGFLGAAGSTMGAASMTLTVQARNLLSGIVQQQSNLLRAPEAQQHLLKLTVWGIKQLQARVLAVERYLRDQQLLGIWGCSGKLICCTNVPWNSSWSNRNLSEIWDNMTWLQWDKEISNYTQIIYGLLEESQNQQEKNEQDLLALD

SEQ ID NO: 117 - DNA, 1981 bp, synthetic construct
  source 1..1981: mol_type = other DNA
gtcgacaagcttcccgggccaccatgggctccctgcagcccctggccaccctgtacctgctgggcatgctggtggcctccgtgctggccgccgagaacctgtgggtgaccgtgtactacggcgtgcccgtgtggaaggaggccaagaccaccctgttctgcgcctccgacgcccgcgcctacgagaaggaggtgcacaacgtgtgggccacccacgcctgcgtgcccaccgacccctccccccaggagctggtgctgggcaacgtgaccgagaacttcaacatgtggaagaacgacatggtggaccagatgcacgaggacatcatctccctgtgggaccagtccctgaagccctgcgtgaagctgacccccctgtgcgtgaccctgatctgctccgacgccaccgtgaagaccggcaccgtggaggagatgaagaactgctccttcaacaccaccaccgagatccgcgacaaggagaagaaggagtacgccctgttctacaagcccgacatcgtgcccctgtccgagaccaacaacacctccgagtaccgcctgatcaactgcaacacctccgcctgcacccaggcctgccccaaggtgaccttcgagcccatccccatccactactgcgcccccgccggctacgccatcctgaagtgcaacgacgagaccttcaacggcaccggcccctgctccaacgtgtccaccgtgcagtgcacccacggcatccgccccgtggtgtccacccagctgctgctgaacggctccctggccgagaaggagatcgtgatccgctccgagaacctgaccaacaacgccaagatcatcatcgtgcacctgcacacccccgtggagatcgtgtgcacccgccccaacaacaacacccgcaagtccgtgcgcatcggccccggccagaccttctacgccaccggcgacatcatcggcgacatcaagcaggcctggtgcaacatctccgaggagaagtggaacgacaccctgcagaaggtgggcatcgagctgcagaagcacttccccaacaagaccatcaagtacaaccagtccgccggcggcgacatggagatcaccacccactccttcaactgcggcggcgagttcttctactgcaacacctccaacctgttcaacggcacctacaacggcacctacatctccaccaactcctccgccaactccacctccaccatcaccctgcagtgccgcatcaagcagatcatcaacatgtggcagggcgtgggccgctgcatgtacgccccccccatcgccggcaacatcacctgccgctccaacatcaccggcctgctgctgacccgcgacggcggcaccaactccaacgagaccgagaccttccgccccgccggcggcgacatgcgcgacaactggcgctccgagctgtacaagtacaaggtggtgaagatcgagcccctgggcgtggcccccacccgctgcaagcgccgcgtggtgggccgccgccgccgccgccgcgccgtgggcatcggcgccgtgttcctgggcttcctgggcgccgccggctccaccatgggcgccgcctccatgaccctgaccgtgcaggcccgcaacctgctgtccggcatcgtgcagcagcagtccaacctgctgcgcgcccccgaggcccagcagcacctgctgaagctgaccgtgtggggcatcaagcagctgcaggcccgcgtgctggccgtggagcgctacctgcgcgaccagcagctgctgggcatctggggctgctccggcaagctgatctgctgcaccaacgtgccctggaactcctcctggtccaaccgcaacctgtccgagatctgggacaacatgacctggctgcagtgggacaaggagatctccaactacacccagatcatctacggcctgctggaggagtcccagaaccagcaggagaagaacgagcaggacctgctggccctggactgataagcggccgcggatcc

SEQ ID NO: 118 - protein, 646 aa, synthetic construct
MGSLQPLATLYLLGMLVASVLAAENLWVTVYYGVPVWKEAKTTLFCASDARAYEKEVHNVWATHACVPTDPSPQELVLGNVTENFNMWKNDMVDQMHEDIISLWDQSLKPCVKLTPLCVTLICSDATVKTGTVEEMKNCSFNTTTEIRDKEKKEYALFYKPDIVPLSETNNTSEYRLINCNTSACTQACPKVTFEPIPIHYCAPAGYAILKCNDETFNGTGPCSNVSTVQCTHGIRPVVSTQLLLNGSLAEKEIVIRSENLTNNAKIIIVHLHTPVEIVCTRPNNNTRKSVRIGPGQTFYATGDIIGDIKQAWCNISEEKWNDTLQKVGIELQKHFPNKTIKYNQSAGGDMEITTHSFNCGGEFFYCNTSNLFNGTYNGTYISTNSSANSTSTITLQCRIKQIINMWQGVGRCMYAPPIAGNITCRSNITGLLLTRDGGTNSNETETFRPAGGDMRDNWRSELYKYKVVKIEPLGVAPTRCKRRVVGRRRRRRAVGIGAVFLGFLGAAGSTMGAASMTLTVQARNLLSGIVQQQSNLLRAPEAQQHLLKLTVWGIKQLQARVLAVERYLRDQQLLGIWGCSGKLICCTNVPWNSSWSNRNLSEIWDNMTWLQWDKEISNYTQIIYGLLEESQNQQEKNEQDLLALD

SEQ ID NO: 119 - DNA, 1981 bp, synthetic construct
  source 1..1981: mol_type = other DNA
gtcgacaagcttcccgggccaccatgggctccctgcagcccctggccaccctgtacctgctgggcatgctggtggcctccgtgctggccgccgagaacctgtgggtgaccgtgtactacggcgtgcccgtgtggaaggaggccaagaccaccctgttctgcgcctccgacgcccgcgcctacgagaaggaggtgcacaacgtgtgggccacccacgcctgcgtgcccaccgacccctccccccaggagctggtgctgggcaacgtgaccgagaacttcaacatgtggaagaacgacatggtggaccagatgcacgaggacatcatctccctgtgggaccagtccctgaagccctgcgtgaagctgacccccctgtgcgtgaccctgatctgctccaacgccaccgtgaagaacggcaccgtggaggagatgaagaactgctccttcaacaccaccaccgagatccgcgacaaggagaagaaggagtacgccctgttctacaagcccgacatcgtgcccctgtccgagaccaacaacacctccgagtaccgcctgatcaactgcaacacctccgcctgcacccaggcctgccccaaggtgaccttcgagcccatccccatccactactgcgcccccgccggctacgccatcctgaagtgcaacgacgagaccttcaacggcaccggcccctgctccaacgtgtccaccgtgcagtgcacccacggcatccgccccgtggtgtccacccagctgctgctgaacggctccctggccgagaaggagatcgtgatccgctccgagaacctgaccaacaacgccaagatcatcatcgtgcacctgcacacccccgtggagatcgtgtgcacccgccccaacaacaacacccgcaagtccgtgcgcatcggccccggccagaccttctacgccaccggcgacatcatcggcgacatcaagcaggcctactgcaacatctccgaggagaagtggaacgacaccctgcagaaggtgggcatcgagctgcagaagcacttccccaacaagaccatcaagtacaaccagtccgccggcggcgacatggagatcaccacccactccttcaactgcggcggcgagttcttctactgcaacacctccaacctgttcaacggcacctacaacggcacctacatctccaccaactcctccgccaactccacctccaccatcaccctgcagtgccgcatcaagcagatcatcaacatgtggcagggcgtgggccgctgcatgtacgccccccccatcgccggcaacatcacctgccgctccaacatcaccggcctgctgctgacccgcgacggcggcaccaactccaacgagaccgagaccttccgccccgccggcggcgacatgcgcgacaactggcgctccgagctgtacaagtacaaggtggtgaagatcgagcccctgggcgtggcccccacccgctgcaagcgccgcgtggtgggccgccgccgccgccgccgcgccgtgggcatcggcgccgtgttcctgggcttcctgggcgccgccggctccaccatgggcgccgcctccatgaccctgaccgtgcaggcccgcaacctgctgtccggcatcgtgcagcagcagtccaacctgctgcgcgcccccgaggcccagcagcacctgctgaagctgaccgtgtggggcatcaagcagctgcaggcccgcgtgctggccgtggagcgctacctgcgcgaccagcagctgctgggcatctggggctgctccggcaagctgatctgctgcaccaacgtgccctggaactcctcctggtccaaccgcaacctgtccgagatctgggacaacatgacctggctgcagtgggacaaggagatctccaactacacccagatcatctacggcctgctggaggagtcccagaaccagcaggagaagaacgagcaggacctgctggccctggactgataagcggccgcggatcc

SEQ ID NO: 120 - protein, 646 aa, synthetic construct
MGSLQPLATLYLLGMLVASVLAAENLWVTVYYGVPVWKEAKTTLFCASDARAYEKEVHNVWATHACVPTDPSPQELVLGNVTENFNMWKNDMVDQMHEDIISLWDQSLKPCVKLTPLCVTLICSNATVKNGTVEEMKNCSFNTTTEIRDKEKKEYALFYKPDIVPLSETNNTSEYRLINCNTSACTQACPKVTFEPIPIHYCAPAGYAILKCNDETFNGTGPCSNVSTVQCTHGIRPVVSTQLLLNGSLAEKEIVIRSENLTNNAKIIIVHLHTPVEIVCTRPNNNTRKSVRIGPGQTFYATGDIIGDIKQAYCNISEEKWNDTLQKVGIELQKHFPNKTIKYNQSAGGDMEITTHSFNCGGEFFYCNTSNLFNGTYNGTYISTNSSANSTSTITLQCRIKQIINMWQGVGRCMYAPPIAGNITCRSNITGLLLTRDGGTNSNETETFRPAGGDMRDNWRSELYKYKVVKIEPLGVAPTRCKRRVVGRRRRRRAVGIGAVFLGFLGAAGSTMGAASMTLTVQARNLLSGIVQQQSNLLRAPEAQQHLLKLTVWGIKQLQARVLAVERYLRDQQLLGIWGCSGKLICCTNVPWNSSWSNRNLSEIWDNMTWLQWDKEISNYTQIIYGLLEESQNQQEKNEQDLLALD

SEQ ID NO: 121 - DNA, 1981 bp, synthetic construct
  source 1..1981: mol_type = other DNA
gtcgacaagcttcccgggccaccatgggctccctgcagcccctggccaccctgtacctgctgggcatgctggtggcctccgtgctggccgccgagaacctgtgggtgaccgtgtactacggcgtgcccgtgtggaaggaggccaagaccaccctgttctgcgcctccgacgcccgcgcctacgagaaggaggtgcacaacgtgtgggccacccacgcctgcgtgcccaccgacccctccccccaggagctggtgctgggcaacgtgaccgagaacttcaacatgtggaagaacgacatggtggaccagatgcacgaggacatcatctccctgtgggaccagtccctgaagccctgcgtgaagctgacccccctgtgcgtgaccctgatctgctccaacgccaccgtgaagaacggcaccgtggaggagatgaagaactgctccttcaacaccaccaccgagatccgcgacaaggagaagaaggagtacgccctgttctacaagcccgacatcgtgcccctgtccgagaccaacaacacctccgagtaccgcctgatcaactgcaacacctccgcctgcacccaggcctgccccaaggtgaccttcgagcccatccccatccactactgcgcccccgccggctacgccatcctgaagtgcaacgacgagaccttcaacggcaccggcccctgctccaacgtgtccaccgtgcagtgcacccacggcatccgccccgtggtgtccacccagctgctgctgaacggctccctggccgagaaggagatcgtgatccgctccgagaacctgaccaacaacgccaagatcatcatcgtgcacctgcacaagcccgtgacgatcgtgtgcacccgccccaacaacaacacccgcaagtccgtgcgcatcggccccggccagaccttctacgccaccggcgacatcatcggcgacatcaagcaggcctactgcaacatctccgaggagaagtggaacgacaccctgcagaaggtgggcatcgagctgcagaagcacttccccaacaagaccatcaagtacaaccagtccgccggcggcgacatggagatcaccacccactccttcaactgcggcggcgagttcttctactgcaacacctccaacctgttcaacggcacctacaacggcacctacatctccaccaactcctccgccaagtccacctccaccatcaccctgcagtgccgcatcaagcagatcatcaacatgtggcagggcgtgggccgctgcatgtacgccccccccatcgccggcgccatcacctgccgctccaacatcaccggcctgctgctgacccgcgacggcggcaccaactccaacgagaccgagaccttccgccccgccggcggcgacatgcgcgacaactggcgctccgagctgtacaagtacaaggtggtgaagatcgagcccctgggcgtggcccccacccgctgcaagcgccgcgtggtgggccgccgccgccgccgccgcgccgtgggcatcggcgccgtgttcctgggcttcctgggcgccgccggctccaccatgggcgccgcctccatgaccctgaccgtgcaggcccgcaacctgctgtccggcatcgtgcagcagcagtccaacctgctgcgcgcccccgaggcccagcagcacctgctgaagctgaccgtgtggggcatcaagcagctgcaggcccgcgtgctggccgtggagcgctacctgcgcgaccagcagctgctgggcatctggggctgctccggcaagctgatctgctgcaccaacgtgccctggaactcctcctggtccaaccgcaacctgtccgagatctgggacaacatgacctggctgcagtgggacaaggagatctccaactacacccagatcatctacggcctgctggaggagtcccagaaccagcaggagaagaacgagcaggacctgctggccctggactgataagcggccgcggatcc

SEQ ID NO: 122 - protein, 646 aa, synthetic construct
MGSLQPLATLYLLGMLVASVLAAENLWVTVYYGVPVWKEAKTTLFCASDARAYEKEVHNVWATHACVPTDPSPQELVLGNVTENFNMWKNDMVDQMHEDIISLWDQSLKPCVKLTPLCVTLICSNATVKNGTVEEMKNCSFNTTTEIRDKEKKEYALFYKPDIVPLSETNNTSEYRLINCNTSACTQACPKVTFEPIPIHYCAPAGYAILKCNDETFNGTGPCSNVSTVQCTHGIRPVVSTQLLLNGSLAEKEIVIRSENLTNNAKIIIVHLHKPVTIVCTRPNNNTRKSVRIGPGQTFYATGDIIGDIKQAYCNISEEKWNDTLQKVGIELQKHFPNKTIKYNQSAGGDMEITTHSFNCGGEFFYCNTSNLFNGTYNGTYISTNSSAKSTSTITLQCRIKQIINMWQGVGRCMYAPPIAGAITCRSNITGLLLTRDGGTNSNETETFRPAGGDMRDNWRSELYKYKVVKIEPLGVAPTRCKRRVVGRRRRRRAVGIGAVFLGFLGAAGSTMGAASMTLTVQARNLLSGIVQQQSNLLRAPEAQQHLLKLTVWGIKQLQARVLAVERYLRDQQLLGIWGCSGKLICCTNVPWNSSWSNRNLSEIWDNMTWLQWDKEISNYTQIIYGLLEESQNQQEKNEQDLLALD

SEQ ID NO: 123 - DNA, 1981 bp, synthetic construct
  source 1..1981: mol_type = other DNA
gtcgacaagcttcccgggccaccatgggctccctgcagcccctggccaccctgtacctgctgggcatgctggtggcctccgtgctggccgccgagaacctgtgggtgaccgtgtactacggcgtgcccgtgtggaaggaggccaagaccaccctgttctgcgcctccgacgcccgcgcctacgagaaggaggtgcacaacgtgtgggccacccacgcctgcgtgcccaccgacccctccccccaggagctggtgctgggcaacgtgaccgagaacttcaacatgtggaagaacgacatggtggaccagatgcacgaggacatcatctccctgtgggaccagtccctgaagccctgcgtgaagctgacccccctgtgcgtgaccctgatctgctccgacgccaccgtgaagaccggcaccgtggaggagatgaagaactgctccttcaacaccaccaccgagatccgcgacaaggagaagaaggagtacgccctgttctacaagcccgacatcgtgcccctgtccgagaccaacaacacctccgagtaccgcctgatcaactgcaacacctccgcctgcacccaggcctgccccaaggtgaccttcgagcccatccccatccactactgcgcccccgccggctacgccatcctgaagtgcaacgacgagaccttcaacggcaccggcccctgctccaacgtgtccaccgtgcagtgcacccacggcatccgccccgtggtgtccacccagctgctgctgaacggctccctggccgagaaggagatcgtgatccgctccgagaacctgaccaacaacgccaagatcatcatcgtgcacctgcacacccccgtggagatcgtgtgcacccgccccaacaacaacacccgcaagtccgtgcgcatcggccccggccagaccttctacgccaccggcgacatcatcggcgacatcaagcaggcctactgcaacatctccgaggagaagtggaacgacaccctgcagaaggtgggcatcgagctgcagaagcacttccccaacaagaccatcaagtacaaccagtccgccggcggcgacatggagatcaccacccactccttcaactgcggcggcgagttcttctactgcaacacctccaacctgttcaacggcacctacaacggcacctacatctccaccaactcctccgccaactccacctccaccatcaccctgcagtgccgcatcaagcagatcatcaacatgtggcagggcgtgggccgctgcatgtacgccccccccatcgccggcaacatcacctgccgctccaacatcaccggcctgctgctgacccgcgacggcggcaccaactccaacgagaccgagaccttccgccccgccggcggcgacatgcgcgacaactggcgctccgagctgtacaagtacaaggtggtgaagatcgagcccctgggcgtggcccccacccgctgcaagcgccgcgtggtgggccgccgccgccgccgccgcgccgtgggcatcggcgccgtgttcctgggcttcctgggcgccgccggctccaccatgggcgccgcctccatgaccctgaccgtgcaggcccgcaacctgctgtccggcatcgtgcagcagcagtccaacctgctgcgcgcccccgaggcccagcagcacctgctgaagctgaccgtgtggggcatcaagcagctgcaggcccgcgtgctggccgtggagcgctacctgcgcgaccagcagctgctgggcatctggggctgctccggcaagctgatctgctgcaccaacgtgccctggaactcctcctggtccaaccgcaacctgtccgagatctgggacaacatgacctggctgcagtgggacaaggagatctccaactacacccagatcatctacggcctgctggaggagtcccagaaccagcaggagaagaacgagcaggacctgctggccctggactgataagcggccgcggatcc

SEQ ID NO: 124 - protein, 646 aa, synthetic construct
MGSLQPLATLYLLGMLVASVLAAENLWVTVYYGVPVWKEAKTTLFCASDARAYEKEVHNVWATHACVPTDPSPQELVLGNVTENFNMWKNDMVDQMHEDIISLWDQSLKPCVKLTPLCVTLICSDATVKTGTVEEMKNCSFNTTTEIRDKEKKEYALFYKPDIVPLSETNNTSEYRLINCNTSACTQACPKVTFEPIPIHYCAPAGYAILKCNDETFNGTGPCSNVSTVQCTHGIRPVVSTQLLLNGSLAEKEIVIRSENLTNNAKIIIVHLHTPVEIVCTRPNNNTRKSVRIGPGQTFYATGDIIGDIKQAYCNISEEKWNDTLQKVGIELQKHFPNKTIKYNQSAGGDMEITTHSFNCGGEFFYCNTSNLFNGTYNGTYISTNSSANSTSTITLQCRIKQIINMWQGVGRCMYAPPIAGNITCRSNITGLLLTRDGGTNSNETETFRPAGGDMRDNWRSELYKYKVVKIEPLGVAPTRCKRRVVGRRRRRRAVGIGAVFLGFLGAAGSTMGAASMTLTVQARNLLSGIVQQQSNLLRAPEAQQHLLKLTVWGIKQLQARVLAVERYLRDQQLLGIWGCSGKLICCTNVPWNSSWSNRNLSEIWDNMTWLQWDKEISNYTQIIYGLLEESQNQQEKNEQDLLALD

SEQ ID NO: 125 - DNA, 1981 bp, synthetic construct
  source 1..1981: mol_type = other DNA
gtcgacaagcttcccgggccaccatgggctccctgcagcccctggccaccctgtacctgctgggcatgctggtggcctccgtgctggccgccgagaacctgtgggtgaccgtgtactacggcgtgcccgtgtggaaggaggccaagaccaccctgttctgcgcctccgacgcccgcgcctacgagaaggaggtgcacaacgtgtgggccacccacgcctgcgtgcccaccgacccctccccccaggagctggtgctgggcaacgtgaccgagaacttcaacatgtggaagaacgacatggtggaccagatgcacgaggacatcatctccctgtgggaccagtccctgaagccctgcgtgaagctgacccccctgtgcgtgaccctgatctgctccaacgccaccgtgaagaacggcaccgtggaggagatgaagaactgctccttcaacaccaccaccgagatccgcgacaaggagaagaaggagtacgccctgttctacaagcccgacatcgtgcccctgtccgagaccaacaacacctccgagtaccgcctgatcaactgcaacacctccgcctgcacccaggcctgccccaaggtgaccttcgagcccatccccatccactactgcgcccccgccggctacgccatcctgaagtgcaacgacgagaccttcaacggcaccggcccctgctccaacgtgtccaccgtgcagtgcacccacggcatccgccccgtggtgtccacccagctgctgctgaacggctccctggccgagaaggagatcgtgatccgctccgagaacctgaccaacaacgccaagatcatcatcgtgcacctgcacacccccgtggagatcgtgtgcacccgccccaacaacaacacccgcaagtccgtgcgcatcggccccggccagaccttctacgccaccggcgacatcatcggcgacatcaagcaggccaactgcaacatctccgaggagaagtggaacgacaccctgcagaaggtgggcatcgagctgcagaagcacttccccaacaagaccatcaagtacaaccagtccgccggcggcgacatggagatcaccacccactccttcaactgcggcggcgagttcttctactgcaacacctccaacctgttcaacggcacctacaacggcacctacatctccaccaactcctccgccaactccacctccaccatcaccctgcagtgccgcatcaagcagatcatcaacatgtggcagggcgtgggccgctgcatgtacgccccccccatcgccggcaacatcacctgccgctccaacatcaccggcctgctgctgacccgcgacggcggcaccaactccaacgagaccgagaccttccgccccgccggcggcgacatgcgcgacaactggcgctccgagctgtacaagtacaaggtggtgaagatcgagcccctgggcgtggcccccacccgctgcaagcgccgcgtggtgggccgccgccgccgccgccgcgccgtgggcatcggcgccgtgttcctgggcttcctgggcgccgccggctccaccatgggcgccgcctccatgaccctgaccgtgcaggcccgcaacctgctgtccggcatcgtgcagcagcagtccaacctgctgcgcgcccccgaggcccagcagcacctgctgaagctgaccgtgtggggcatcaagcagctgcaggcccgcgtgctggccgtggagcgctacctgcgcgaccagcagctgctgggcatctggggctgctccggcaagctgatctgctgcaccaacgtgccctggaactcctcctggtccaaccgcaacctgtccgagatctgggacaacatgacctggctgcagtgggacaaggagatctccaactacacccagatcatctacggcctgctggaggagtcccagaaccagcaggagaagaacgagcaggacctgctggccctggactgataagcggccgcggatcc

SEQ ID NO: 126 - protein, 646 aa, synthetic construct
MGSLQPLATLYLLGMLVASVLAAENLWVTVYYGVPVWKEAKTTLFCASDARAYEKEVHNVWATHACVPTDPSPQELVLGNVTENFNMWKNDMVDQMHEDIISLWDQSLKPCVKLTPLCVTLICSNATVKNGTVEEMKNCSFNTTTEIRDKEKKEYALFYKPDIVPLSETNNTSEYRLINCNTSACTQACPKVTFEPIPIHYCAPAGYAILKCNDETFNGTGPCSNVSTVQCTHGIRPVVSTQLLLNGSLAEKEIVIRSENLTNNAKIIIVHLHTPVEIVCTRPNNNTRKSVRIGPGQTFYATGDIIGDIKQANCNISEEKWNDTLQKVGIELQKHFPNKTIKYNQSAGGDMEITTHSFNCGGEFFYCNTSNLFNGTYNGTYISTNSSANSTSTITLQCRIKQIINMWQGVGRCMYAPPIAGNITCRSNITGLLLTRDGGTNSNETETFRPAGGDMRDNWRSELYKYKVVKIEPLGVAPTRCKRRVVGRRRRRRAVGIGAVFLGFLGAAGSTMGAASMTLTVQARNLLSGIVQQQSNLLRAPEAQQHLLKLTVWGIKQLQARVLAVERYLRDQQLLGIWGCSGKLICCTNVPWNSSWSNRNLSEIWDNMTWLQWDKEISNYTQIIYGLLEESQNQQEKNEQDLLALD

SEQ ID NO: 127 - DNA, 1981 bp, synthetic construct
  source 1..1981: mol_type = other DNA
gtcgacaagcttcccgggccaccatgggctccctgcagcccctggccaccctgtacctgctgggcatgctggtggcctccgtgctggccgccgagaacctgtgggtgaccgtgtactacggcgtgcccgtgtggaaggaggccaagaccaccctgttctgcgcctccgacgcccgcgcctacgagaaggaggtgcacaacgtgtgggccacccacgcctgcgtgcccaccgacccctccccccaggagctggtgctgggcaacgtgaccgagaacttcaacatgtggaagaacgacatggtggaccagatgcacgaggacatcatctccctgtgggaccagtccctgaagccctgcgtgaagctgacccccctgtgcgtgaccctgatctgctccaacgccaccgtgaagaacggcaccgtggaggagatgaagaactgctccttcaacaccaccaccgagatccgcgacaaggagaagaaggagtacgccctgttctacaagcccgacatcgtgcccctgtccgagaccaacaacacctccgagtaccgcctgatcaactgcaacacctccgcctgcacccaggcctgccccaaggtgaccttcgagcccatccccatccactactgcgcccccgccggctacgccatcctgaagtgcaacgacgagaccttcaacggcaccggcccctgctccaacgtgtccaccgtgcagtgcacccacggcatccgccccgtggtgtccacccagctgctgctgaacggctccctggccgagaaggagatcgtgatccgctccgagaacctgaccaacaacgccaagatcatcatcgtgcacctgcacaagcccgtgacgatcgtgtgcacccgccccaacaacaacacccgcaagtccgtgcgcatcggccccggccagaccttctacgccaccggcgacatcatcggcgacatcaagcaggccaactgcaacatctccgaggagaagtggaacgacaccctgcagaaggtgggcatcgagctgcagaagcacttccccaacaagaccatcaagtacaaccagtccgccggcggcgacatggagatcaccacccactccttcaactgcggcggcgagttcttctactgcaacacctccaacctgttcaacggcacctacaacggcacctacatctccaccaactcctccgccaagtccacctccaccatcaccctgcagtgccgcatcaagcagatcatcaacatgtggcagggcgtgggccgctgcatgtacgccccccccatcgccggcgccatcacctgccgctccaacatcaccggcctgctgctgacccgcgacggcggcaccaactccaacgagaccgagaccttccgccccgccggcggcgacatgcgcgacaactggcgctccgagctgtacaagtacaaggtggtgaagatcgagcccctgggcgtggcccccacccgctgcaagcgccgcgtggtgggccgccgccgccgccgccgcgccgtgggcatcggcgccgtgttcctgggcttcctgggcgccgccggctccaccatgggcgccgcctccatgaccctgaccgtgcaggcccgcaacctgctgtccggcatcgtgcagcagcagtccaacctgctgcgcgcccccgaggcccagcagcacctgctgaagctgaccgtgtggggcatcaagcagctgcaggcccgcgtgctggccgtggagcgctacctgcgcgaccagcagctgctgggcatctggggctgctccggcaagctgatctgctgcaccaacgtgccctggaactcctcctggtccaaccgcaacctgtccgagatctgggacaacatgacctggctgcagtgggacaaggagatctccaactacacccagatcatctacggcctgctggaggagtcccagaaccagcaggagaagaacgagcaggacctgctggccctggactgataagcggccgcggatcc

SEQ ID NO: 128 - protein, 646 aa, synthetic construct
MGSLQPLATLYLLGMLVASVLAAENLWVTVYYGVPVWKEAKTTLFCASDARAYEKEVHNVWATHACVPTDPSPQELVLGNVTENFNMWKNDMVDQMHEDIISLWDQSLKPCVKLTPLCVTLICSNATVKNGTVEEMKNCSFNTTTEIRDKEKKEYALFYKPDIVPLSETNNTSEYRLINCNTSACTQACPKVTFEPIPIHYCAPAGYAILKCNDETFNGTGPCSNVSTVQCTHGIRPVVSTQLLLNGSLAEKEIVIRSENLTNNAKIIIVHLHKPVTIVCTRPNNNTRKSVRIGPGQTFYATGDIIGDIKQANCNISEEKWNDTLQKVGIELQKHFPNKTIKYNQSAGGDMEITTHSFNCGGEFFYCNTSNLFNGTYNGTYISTNSSAKSTSTITLQCRIKQIINMWQGVGRCMYAPPIAGAITCRSNITGLLLTRDGGTNSNETETFRPAGGDMRDNWRSELYKYKVVKIEPLGVAPTRCKRRVVGRRRRRRAVGIGAVFLGFLGAAGSTMGAASMTLTVQARNLLSGIVQQQSNLLRAPEAQQHLLKLTVWGIKQLQARVLAVERYLRDQQLLGIWGCSGKLICCTNVPWNSSWSNRNLSEIWDNMTWLQWDKEISNYTQIIYGLLEESQNQQEKNEQDLLALD

SEQ ID NO: 129 - DNA, 1981 bp, synthetic construct
  source 1..1981: mol_type = other DNA
gtcgacaagcttcccgggccaccatgggctccctgcagcccctggccaccctgtacctgctgggcatgctggtggcctccgtgctggccgccgagaacctgtgggtgaccgtgtactacggcgtgcccgtgtggaaggaggccaagaccaccctgttctgcgcctccgacgcccgcgcctacgagaaggaggtgcacaacgtgtgggccacccacgcctgcgtgcccaccgacccctccccccaggagctggtgctgggcaacgtgaccgagaacttcaacatgtggaagaacgacatggtggaccagatgcacgaggacatcatctccctgtgggaccagtccctgaagccctgcgtgaagctgacccccctgtgcgtgaccctgatctgctccgacgccaccgtgaagaccggcaccgtggaggagatgaagaactgctccttcaacaccaccaccgagatccgcgacaaggagaagaaggagtacgccctgttctacaagcccgacatcgtgcccctgtccgagaccaacaacacctccgagtaccgcctgatcaactgcaacacctccgcctgcacccaggcctgccccaaggtgaccttcgagcccatccccatccactactgcgcccccgccggctacgccatcctgaagtgcaacgacgagaccttcaacggcaccggcccctgctccaacgtgtccaccgtgcagtgcacccacggcatccgccccgtggtgtccacccagctgctgctgaacggctccctggccgagaaggagatcgtgatccgctccgagaacctgaccaacaacgccaagatcatcatcgtgcacctgcacacccccgtggagatcgtgtgcacccgccccaacaacaacacccgcaagtccgtgcgcatcggccccggccagaccttctacgccaccggcgacatcatcggcgacatcaagcaggccaactgcaacatctccgaggagaagtggaacgacaccctgcagaaggtgggcatcgagctgcagaagcacttccccaacaagaccatcaagtacaaccagtccgccggcggcgacatggagatcaccacccactccttcaactgcggcggcgagttcttctactgcaacacctccaacctgttcaacggcacctacaacggcacctacatctccaccaactcctccgccaactccacctccaccatcaccctgcagtgccgcatcaagcagatcatcaacatgtggcagggcgtgggccgctgcatgtacgccccccccatcgccggcaacatcacctgccgctccaacatcaccggcctgctgctgacccgcgacggcggcaccaactccaacgagaccgagaccttccgccccgccggcggcgacatgcgcgacaactggcgctccgagctgtacaagtacaaggtggtgaagatcgagcccctgggcgtggcccccacccgctgcaagcgccgcgtggtgggccgccgccgccgccgccgcgccgtgggcatcggcgccgtgttcctgggcttcctgggcgccgccggctccaccatgggcgccgcctccatgaccctgaccgtgcaggcccgcaacctgctgtccggcatcgtgcagcagcagtccaacctgctgcgcgcccccgaggcccagcagcacctgctgaagctgaccgtgtggggcatcaagcagctgcaggcccgcgtgctggccgtggagcgctacctgcgcgaccagcagctgctgggcatctggggctgctccggcaagctgatctgctgcaccaacgtgccctggaactcctcctggtccaaccgcaacctgtccgagatctgggacaacatgacctggctgcagtgggacaaggagatctccaactacacccagatcatctacggcctgctggaggagtcccagaaccagcaggagaagaacgagcaggacctgctggccctggactgataagcggccgcggatcc

SEQ ID NO: 130 - protein, 646 aa, synthetic construct
MGSLQPLATLYLLGMLVASVLAAENLWVTVYYGVPVWKEAKTTLFCASDARAYEKEVHNVWATHACVPTDPSPQELVLGNVTENFNMWKNDMVDQMHEDIISLWDQSLKPCVKLTPLCVTLICSDATVKTGTVEEMKNCSFNTTTEIRDKEKKEYALFYKPDIVPLSETNNTSEYRLINCNTSACTQACPKVTFEPIPIHYCAPAGYAILKCNDETFNGTGPCSNVSTVQCTHGIRPVVSTQLLLNGSLAEKEIVIRSENLTNNAKIIIVHLHTPVEIVCTRPNNNTRKSVRIGPGQTFYATGDIIGDIKQANCNISEEKWNDTLQKVGIELQKHFPNKTIKYNQSAGGDMEITTHSFNCGGEFFYCNTSNLFNGTYNGTYISTNSSANSTSTITLQCRIKQIINMWQGVGRCMYAPPIAGNITCRSNITGLLLTRDGGTNSNETETFRPAGGDMRDNWRSELYKYKVVKIEPLGVAPTRCKRRVVGRRRRRRAVGIGAVFLGFLGAAGSTMGAASMTLTVQARNLLSGIVQQQSNLLRAPEAQQHLLKLTVWGIKQLQARVLAVERYLRDQQLLGIWGCSGKLICCTNVPWNSSWSNRNLSEIWDNMTWLQWDKEISNYTQIIYGLLEESQNQQEKNEQDLLALD

SEQ ID NO: 131 - DNA, 1981 bp, synthetic construct
  source 1..1981: mol_type = other DNA
gtcgacaagcttcccgggccaccatgggctccctgcagcccctggccaccctgtacctgctgggcatgctggtggcctccgtgctggccgccgagaacctgtgggtgaccgtgtactacggcgtgcccgtgtggaaggaggccaagaccaccctgttctgcgcctccgacgcccgcgcctacgagaaggaggtgcacaacgtgtgggccacccacgcctgcgtgcccaccgacccctccccccaggagctggtgctgggcaacgtgaccgagaacttcaacatgtggaagaacgacatggtggaccagatgcacgaggacatcatctccctgtgggaccagtccctgaagccctgcgtgaagctgacccccctgtgcgtgaccctgatctgctccaacgccaccgtgaagaacggcaccgtggaggagatgaagaactgctccttcaacaccaccaccgagatccgcgacaaggagaagaaggagtacgccctgttctacaagcccgacatcgtgcccctgtccgagaccaacaacacctccgagtaccgcctgatcaactgcaacacctccgcctgcacccaggcctgccccaaggtgaccttcgagcccatccccatccactactgcgcccccgccggctacgccatcctgaagtgcaacgacgagaccttcaacggcaccggcccctgctccaacgtgtccaccgtgcagtgcacccacggcatccgccccgtggtgtccacccagctgctgctgaacggctccctggccgagaaggagatcgtgatccgctccgagaacctgaccaacaacgccaagatcatcatcgtgcacctgcacacccccgtggagatcgtgtgcacccgccccaacaacaacacccgcaagtccgtgcgcatcggccccggccagaccttctacgccaccggcgacatcatcggcgacatcaagcaggcccagtgcaacatctccgaggagaagtggaacgacaccctgcagaaggtgggcatcgagctgcagaagcacttccccaacaagaccatcaagtacaaccagtccgccggcggcgacatggagatcaccacccactccttcaactgcggcggcgagttcttctactgcaacacctccaacctgttcaacggcacctacaacggcacctacatctccaccaactcctccgccaactccacctccaccatcaccctgcagtgccgcatcaagcagatcatcaacatgtggcagggcgtgggccgctgcatgtacgccccccccatcgccggcaacatcacctgccgctccaacatcaccggcctgctgctgacccgcgacggcggcaccaactccaacgagaccgagaccttccgccccgccggcggcgacatgcgcgacaactggcgctccgagctgtacaagtacaaggtggtgaagatcgagcccctgggcgtggcccccacccgctgcaagcgccgcgtggtgggccgccgccgccgccgccgcgccgtgggcatcggcgccgtgttcctgggcttcctgggcgccgccggctccaccatgggcgccgcctccatgaccctgaccgtgcaggcccgcaacctgctgtccggcatcgtgcagcagcagtccaacctgctgcgcgcccccgaggcccagcagcacctgctgaagctgaccgtgtggggcatcaagcagctgcaggcccgcgtgctggccgtggagcgctacctgcgcgaccagcagctgctgggcatctggggctgctccggcaagctgatctgctgcaccaacgtgccctggaactcctcctggtccaaccgcaacctgtccgagatctgggacaacatgacctggctgcagtgggacaaggagatctccaactacacccagatcatctacggcctgctggaggagtcccagaaccagcaggagaagaacgagcaggacctgctggccctggactgataagcggccgcggatcc

SEQ ID NO: 132 - protein, 646 aa, synthetic construct
MGSLQPLATLYLLGMLVASVLAAENLWVTVYYGVPVWKEAKTTLFCASDARAYEKEVHNVWATHACVPTDPSPQELVLGNVTENFNMWKNDMVDQMHEDIISLWDQSLKPCVKLTPLCVTLICSNATVKNGTVEEMKNCSFNTTTEIRDKEKKEYALFYKPDIVPLSETNNTSEYRLINCNTSACTQACPKVTFEPIPIHYCAPAGYAILKCNDETFNGTGPCSNVSTVQCTHGIRPVVSTQLLLNGSLAEKEIVIRSENLTNNAKIIIVHLHTPVEIVCTRPNNNTRKSVRIGPGQTFYATGDIIGDIKQAQCNISEEKWNDTLQKVGIELQKHFPNKTIKYNQSAGGDMEITTHSFNCGGEFFYCNTSNLFNGTYNGTYISTNSSANSTSTITLQCRIKQIINMWQGVGRCMYAPPIAGNITCRSNITGLLLTRDGGTNSNETETFRPAGGDMRDNWRSELYKYKVVKIEPLGVAPTRCKRRVVGRRRRRRAVGIGAVFLGFLGAAGSTMGAASMTLTVQARNLLSGIVQQQSNLLRAPEAQQHLLKLTVWGIKQLQARVLAVERYLRDQQLLGIWGCSGKLICCTNVPWNSSWSNRNLSEIWDNMTWLQWDKEISNYTQIIYGLLEESQNQQEKNEQDLLALD

SEQ ID NO: 133 - DNA, 1981 bp, synthetic construct
  source 1..1981: mol_type = other DNA
gtcgacaagcttcccgggccaccatgggctccctgcagcccctggccaccctgtacctgctgggcatgctggtggcctccgtgctggccgccgagaacctgtgggtgaccgtgtactacggcgtgcccgtgtggaaggaggccaagaccaccctgttctgcgcctccgacgcccgcgcctacgagaaggaggtgcacaacgtgtgggccacccacgcctgcgtgcccaccgacccctccccccaggagctggtgctgggcaacgtgaccgagaacttcaacatgtggaagaacgacatggtggaccagatgcacgaggacatcatctccctgtgggaccagtccctgaagccctgcgtgaagctgacccccctgtgcgtgaccctgatctgctccaacgccaccgtgaagaacggcaccgtggaggagatgaagaactgctccttcaacaccaccaccgagatccgcgacaaggagaagaaggagtacgccctgttctacaagcccgacatcgtgcccctgtccgagaccaacaacacctccgagtaccgcctgatcaactgcaacacctccgcctgcacccaggcctgccccaaggtgaccttcgagcccatccccatccactactgcgcccccgccggctacgccatcctgaagtgcaacgacgagaccttcaacggcaccggcccctgctccaacgtgtccaccgtgcagtgcacccacggcatccgccccgtggtgtccacccagctgctgctgaacggctccctggccgagaaggagatcgtgatccgctccgagaacctgaccaacaacgccaagatcatcatcgtgcacctgcacaagcccgtgacgatcgtgtgcacccgccccaacaacaacacccgcaagtccgtgcgcatcggccccggccagaccttctacgccaccggcgacatcatcggcgacatcaagcaggcccagtgcaacatctccgaggagaagtggaacgacaccctgcagaaggtgggcatcgagctgcagaagcacttccccaacaagaccatcaagtacaaccagtccgccggcggcgacatggagatcaccacccactccttcaactgcggcggcgagttcttctactgcaacacctccaacctgttcaacggcacctacaacggcacctacatctccaccaactcctccgccaagtccacctccaccatcaccctgcagtgccgcatcaagcagatcatcaacatgtggcagggcgtgggccgctgcatgtacgccccccccatcgccggcgccatcacctgccgctccaacatcaccggcctgctgctgacccgcgacggcggcaccaactccaacgagaccgagaccttccgccccgccggcggcgacatgcgcgacaactggcgctccgagctgtacaagtacaaggtggtgaagatcgagcccctgggcgtggcccccacccgctgcaagcgccgcgtggtgggccgccgccgccgccgccgcgccgtgggcatcggcgccgtgttcctgggcttcctgggcgccgccggctccaccatgggcgccgcctccatgaccctgaccgtgcaggcccgcaacctgctgtccggcatcgtgcagcagcagtccaacctgctgcgcgcccccgaggcccagcagcacctgctgaagctgaccgtgtggggcatcaagcagctgcaggcccgcgtgctggccgtggagcgctacctgcgcgaccagcagctgctgggcatctggggctgctccggcaagctgatctgctgcaccaacgtgccctggaactcctcctggtccaaccgcaacctgtccgagatctgggacaacatgacctggctgcagtgggacaaggagatctccaactacacccagatcatctacggcctgctggaggagtcccagaaccagcaggagaagaacgagcaggacctgctggccctggactgataagcggccgcggatcc

SEQ ID NO: 134 - protein, 646 aa, synthetic construct
MGSLQPLATLYLLGMLVASVLAAENLWVTVYYGVPVWKEAKTTLFCASDARAYEKEVHNVWATHACVPTDPSPQELVLGNVTENFNMWKNDMVDQMHEDIISLWDQSLKPCVKLTPLCVTLICSNATVKNGTVEEMKNCSFNTTTEIRDKEKKEYALFYKPDIVPLSETNNTSEYRLINCNTSACTQACPKVTFEPIPIHYCAPAGYAILKCNDETFNGTGPCSNVSTVQCTHGIRPVVSTQLLLNGSLAEKEIVIRSENLTNNAKIIIVHLHKPVTIVCTRPNNNTRKSVRIGPGQTFYATGDIIGDIKQAQCNISEEKWNDTLQKVGIELQKHFPNKTIKYNQSAGGDMEITTHSFNCGGEFFYCNTSNLFNGTYNGTYISTNSSAKSTSTITLQCRIKQIINMWQGVGRCMYAPPIAGAITCRSNITGLLLTRDGGTNSNETETFRPAGGDMRDNWRSELYKYKVVKIEPLGVAPTRCKRRVVGRRRRRRAVGIGAVFLGFLGAAGSTMGAASMTLTVQARNLLSGIVQQQSNLLRAPEAQQHLLKLTVWGIKQLQARVLAVERYLRDQQLLGIWGCSGKLICCTNVPWNSSWSNRNLSEIWDNMTWLQWDKEISNYTQIIYGLLEESQNQQEKNEQDLLALD

SEQ ID NO: 135 - DNA, 1981 bp, synthetic construct
  source 1..1981: mol_type = other DNA
gtcgacaagcttcccgggccaccatgggctccctgcagcccctggccaccctgtacctgctgggcatgctggtggcctccgtgctggccgccgagaacctgtgggtgaccgtgtactacggcgtgcccgtgtggaaggaggccaagaccaccctgttctgcgcctccgacgcccgcgcctacgagaaggaggtgcacaacgtgtgggccacccacgcctgcgtgcccaccgacccctccccccaggagctggtgctgggcaacgtgaccgagaacttcaacatgtggaagaacgacatggtggaccagatgcacgaggacatcatctccctgtgggaccagtccctgaagccctgcgtgaagctgacccccctgtgcgtgaccctgatctgctccgacgccaccgtgaagaccggcaccgtggaggagatgaagaactgctccttcaacaccaccaccgagatccgcgacaaggagaagaaggagtacgccctgttctacaagcccgacatcgtgcccctgtccgagaccaacaacacctccgagtaccgcctgatcaactgcaacacctccgcctgcacccaggcctgccccaaggtgaccttcgagcccatccccatccactactgcgcccccgccggctacgccatcctgaagtgcaacgacgagaccttcaacggcaccggcccctgctccaacgtgtccaccgtgcagtgcacccacggcatccgccccgtggtgtccacccagctgctgctgaacggctccctggccgagaaggagatcgtgatccgctccgagaacctgaccaacaacgccaagatcatcatcgtgcacctgcacacccccgtggagatcgtgtgcacccgccccaacaacaacacccgcaagtccgtgcgcatcggccccggccagaccttctacgccaccggcgacatcatcggcgacatcaagcaggcccagtgcaacatctccgaggagaagtggaacgacaccctgcagaaggtgggcatcgagctgcagaagcacttccccaacaagaccatcaagtacaaccagtccgccggcggcgacatggagatcaccacccactccttcaactgcggcggcgagttcttctactgcaacacctccaacctgttcaacggcacctacaacggcacctacatctccaccaactcctccgccaactccacctccaccatcaccctgcagtgccgcatcaagcagatcatcaacatgtggcagggcgtgggccgctgcatgtacgccccccccatcgccggcaacatcacctgccgctccaacatcaccggcctgctgctgacccgcgacggcggcaccaactccaacgagaccgagaccttccgccccgccggcggcgacatgcgcgacaactggcgctccgagctgtacaagtacaaggtggtgaagatcgagcccctgggcgtggcccccacccgctgcaagcgccgcgtggtgggccgccgccgccgccgccgcgccgtgggcatcggcgccgtgttcctgggcttcctgggcgccgccggctccaccatgggcgccgcctccatgaccctgaccgtgcaggcccgcaacctgctgtccggcatcgtgcagcagcagtccaacctgctgcgcgcccccgaggcccagcagcacctgctgaagctgaccgtgtggggcatcaagcagctgcaggcccgcgtgctggccgtggagcgctacctgcgcgaccagcagctgctgggcatctggggctgctccggcaagctgatctgctgcaccaacgtgccctggaactcctcctggtccaaccgcaacctgtccgagatctgggacaacatgacctggctgcagtgggacaaggagatctccaactacacccagatcatctacggcctgctggaggagtcccagaaccagcaggagaagaacgagcaggacctgctggccctggactgataagcggccgcggatcc

SEQ ID NO: 136 - protein, 646 aa, synthetic construct
MGSLQPLATLYLLGMLVASVLAAENLWVTVYYGVPVWKEAKTTLFCASDARAYEKEVHNVWATHACVPTDPSPQELVLGNVTENFNMWKNDMVDQMHEDIISLWDQSLKPCVKLTPLCVTLICSDATVKTGTVEEMKNCSFNTTTEIRDKEKKEYALFYKPDIVPLSETNNTSEYRLINCNTSACTQACPKVTFEPIPIHYCAPAGYAILKCNDETFNGTGPCSNVSTVQCTHGIRPVVSTQLLLNGSLAEKEIVIRSENLTNNAKIIIVHLHTPVEIVCTRPNNNTRKSVRIGPGQTFYATGDIIGDIKQAQCNISEEKWNDTLQKVGIELQKHFPNKTIKYNQSAGGDMEITTHSFNCGGEFFYCNTSNLFNGTYNGTYISTNSSANSTSTITLQCRIKQIINMWQGVGRCMYAPPIAGNITCRSNITGLLLTRDGGTNSNETETFRPAGGDMRDNWRSELYKYKVVKIEPLGVAPTRCKRRVVGRRRRRRAVGIGAVFLGFLGAAGSTMGAASMTLTVQARNLLSGIVQQQSNLLRAPEAQQHLLKLTVWGIKQLQARVLAVERYLRDQQLLGIWGCSGKLICCTNVPWNSSWSNRNLSEIWDNMTWLQWDKEISNYTQIIYGLLEESQNQQEKNEQDLLALD

SEQ ID NO: 137 - DNA, 1981 bp, synthetic construct
  source 1..1981: mol_type = other DNA
gtcgacaagcttcccgggccaccatgggctccctgcagcccctggccaccctgtacctgctgggcatgctggtggcctccgtgctggccgccgagaacctgtgggtgaccgtgtactacggcgtgcccgtgtggaaggaggccaagaccaccctgttctgcgcctccgacgcccgcgcctacgagaaggaggtgcacaacgtgtgggccacccacgcctgcgtgcccaccgacccctccccccaggagctggtgctgggcaacgtgaccgagaacttcaacatgtggaagaacgacatggtggaccagatgcacgaggacatcatctccctgtgggaccagtccctgaagccctgcgtgaagctgacccccctgtgcgtgaccctgatctgctccaacgccaccgtgaagaacggcaccgtggaggagatgaagaactgctccttcaacaccaccaccgagatccgcgacaaggagaagaaggagtacgccctgttctacaagcccgacatcgtgcccctgtccgagaccaacaacacctccgagtaccgcctgatcaactgcaacacctccgcctgcacccaggcctgccccaaggtgaccttcgagcccatccccatccactactgcgcccccgccggctacgccatcctgaagtgcaacgacgagaccttcaacggcaccggcccctgctccaacgtgtccaccgtgcagtgcacccacggcatccgccccgtggtgtccacccagctgctgctgaacggctccctggccgagaaggagatcgtgatccgctccgagaacctgaccaacaacgccaagatcatcatcgtgcacctgcacacccccgtggagatcgtgtgcacccgccccaacaacaacacccgcaagtccgtgcgcatcggccccggccagaccttctacgccaccggcgacatcatcggcgacatcaagcaggccaggtgcaacatctccgaggagaagtggaacgacaccctgcagaaggtgggcatcgagctgcagaagcacttccccaacaagaccatcaagtacaaccagtccgccggcggcgacatggagatcaccacccactccttcaactgcggcggcgagttcttctactgcaacacctccaacctgttcaacggcacctacaacggcacctacatctccaccaactcctccgccaactccacctccaccatcaccctgcagtgccgcatcaagcagatcatcaacatgtggcagggcgtgggccgctgcatgtacgccccccccatcgccggcaacatcacctgccgctccaacatcaccggcctgctgctgacccgcgacggcggcaccaactccaacgagaccgagaccttccgccccgccggcggcgacatgcgcgacaactggcgctccgagctgtacaagtacaaggtggtgaagatcgagcccctgggcgtggcccccacccgctgcaagcgccgcgtggtgggccgccgccgccgccgccgcgccgtgggcatcggcgccgtgttcctgggcttcctgggcgccgccggctccaccatgggcgccgcctccatgaccctgaccgtgcaggcccgcaacctgctgtccggcatcgtgcagcagcagtccaacctgctgcgcgcccccgaggcccagcagcacctgctgaagctgaccgtgtggggcatcaagcagctgcaggcccgcgtgctggccgtggagcgctacctgcgcgaccagcagctgctgggcatctggggctgctccggcaagctgatctgctgcaccaacgtgccctggaactcctcctggtccaaccgcaacctgtccgagatctgggacaacatgacctggctgcagtgggacaaggagatctccaactacacccagatcatctacggcctgctggaggagtcccagaaccagcaggagaagaacgagcaggacctgctggccctggactgataagcggccgcggatcc

SEQ ID NO: 138 - protein, 646 aa, synthetic construct
MGSLQPLATLYLLGMLVASVLAAENLWVTVYYGVPVWKEAKTTLFCASDARAYEKEVHNVWATHACVPTDPSPQELVLGNVTENFNMWKNDMVDQMHEDIISLWDQSLKPCVKLTPLCVTLICSNATVKNGTVEEMKNCSFNTTTEIRDKEKKEYALFYKPDIVPLSETNNTSEYRLINCNTSACTQACPKVTFEPIPIHYCAPAGYAILKCNDETFNGTGPCSNVSTVQCTHGIRPVVSTQLLLNGSLAEKEIVIRSENLTNNAKIIIVHLHTPVEIVCTRPNNNTRKSVRIGPGQTFYATGDIIGDIKQARCNISEEKWNDTLQKVGIELQKHFPNKTIKYNQSAGGDMEITTHSFNCGGEFFYCNTSNLFNGTYNGTYISTNSSANSTSTITLQCRIKQIINMWQGVGRCMYAPPIAGNITCRSNITGLLLTRDGGTNSNETETFRPAGGDMRDNWRSELYKYKVVKIEPLGVAPTRCKRRVVGRRRRRRAVGIGAVFLGFLGAAGSTMGAASMTLTVQARNLLSGIVQQQSNLLRAPEAQQHLLKLTVWGIKQLQARVLAVERYLRDQQLLGIWGCSGKLICCTNVPWNSSWSNRNLSEIWDNMTWLQWDKEISNYTQIIYGLLEESQNQQEKNEQDLLALD

SEQ ID NO: 139 - DNA, 1981 bp, synthetic construct
  source 1..1981: mol_type = other DNA
gtcgacaagcttcccgggccaccatgggctccctgcagcccctggccaccctgtacctgctgggcatgctggtggcctccgtgctggccgccgagaacctgtgggtgaccgtgtactacggcgtgcccgtgtggaaggaggccaagaccaccctgttctgcgcctccgacgcccgcgcctacgagaaggaggtgcacaacgtgtgggccacccacgcctgcgtgcccaccgacccctccccccaggagctggtgctgggcaacgtgaccgagaacttcaacatgtggaagaacgacatggtggaccagatgcacgaggacatcatctccctgtgggaccagtccctgaagccctgcgtgaagctgacccccctgtgcgtgaccctgatctgctccaacgccaccgtgaagaacggcaccgtggaggagatgaagaactgctccttcaacaccaccaccgagatccgcgacaaggagaagaaggagtacgccctgttctacaagcccgacatcgtgcccctgtccgagaccaacaacacctccgagtaccgcctgatcaactgcaacacctccgcctgcacccaggcctgccccaaggtgaccttcgagcccatccccatccactactgcgcccccgccggctacgccatcctgaagtgcaacgacgagaccttcaacggcaccggcccctgctccaacgtgtccaccgtgcagtgcacccacggcatccgccccgtggtgtccacccagctgctgctgaacggctccctggccgagaaggagatcgtgatccgctccgagaacctgaccaacaacgccaagatcatcatcgtgcacctgcacaagcccgtgacgatcgtgtgcacccgccccaacaacaacacccgcaagtccgtgcgcatcggccccggccagaccttctacgccaccggcgacatcatcggcgacatcaagcaggccaggtgcaacatctccgaggagaagtggaacgacaccctgcagaaggtgggcatcgagctgcagaagcacttccccaacaagaccatcaagtacaaccagtccgccggcggcgacatggagatcaccacccactccttcaactgcggcggcgagttcttctactgcaacacctccaacctgttcaacggcacctacaacggcacctacatctccaccaactcctccgccaagtccacctccaccatcaccctgcagtgccgcatcaagcagatcatcaacatgtggcagggcgtgggccgctgcatgtacgccccccccatcgccggcgccatcacctgccgctccaacatcaccggcctgctgctgacccgcgacggcggcaccaactccaacgagaccgagaccttccgccccgccggcggcgacatgcgcgacaactggcgctccgagctgtacaagtacaaggtggtgaagatcgagcccctgggcgtggcccccacccgctgcaagcgccgcgtggtgggccgccgccgccgccgccgcgccgtgggcatcggcgccgtgttcctgggcttcctgggcgccgccggctccaccatgggcgccgcctccatgaccctgaccgtgcaggcccgcaacctgctgtccggcatcgtgcagcagcagtccaacctgctgcgcgcccccgaggcccagcagcacctgctgaagctgaccgtgtggggcatcaagcagctgcaggcccgcgtgctggccgtggagcgctacctgcgcgaccagcagctgctgggcatctggggctgctccggcaagctgatctgctgcaccaacgtgccctggaactcctcctggtccaaccgcaacctgtccgagatctgggacaacatgacctggctgcagtgggacaaggagatctccaactacacccagatcatctacggcctgctggaggagtcccagaaccagcaggagaagaacgagcaggacctgctggccctggactgataagcggccgcggatcc

SEQ ID NO: 140 - protein, 646 aa, synthetic construct
MGSLQPLATLYLLGMLVASVLAAENLWVTVYYGVPVWKEAKTTLFCASDARAYEKEVHNVWATHACVPTDPSPQELVLGNVTENFNMWKNDMVDQMHEDIISLWDQSLKPCVKLTPLCVTLICSNATVKNGTVEEMKNCSFNTTTEIRDKEKKEYALFYKPDIVPLSETNNTSEYRLINCNTSACTQACPKVTFEPIPIHYCAPAGYAILKCNDETFNGTGPCSNVSTVQCTHGIRPVVSTQLLLNGSLAEKEIVIRSENLTNNAKIIIVHLHKPVTIVCTRPNNNTRKSVRIGPGQTFYATGDIIGDIKQARCNISEEKWNDTLQKVGIELQKHFPNKTIKYNQSAGGDMEITTHSFNCGGEFFYCNTSNLFNGTYNGTYISTNSSAKSTSTITLQCRIKQIINMWQGVGRCMYAPPIAGAITCRSNITGLLLTRDGGTNSNETETFRPAGGDMRDNWRSELYKYKVVKIEPLGVAPTRCKRRVVGRRRRRRAVGIGAVFLGFLGAAGSTMGAASMTLTVQARNLLSGIVQQQSNLLRAPEAQQHLLKLTVWGIKQLQARVLAVERYLRDQQLLGIWGCSGKLICCTNVPWNSSWSNRNLSEIWDNMTWLQWDKEISNYTQIIYGLLEESQNQQEKNEQDLLALD

SEQ ID NO: 141 - DNA, 1981 bp, synthetic construct
  source 1..1981: mol_type = other DNA
gtcgacaagcttcccgggccaccatgggctccctgcagcccctggccaccctgtacctgctgggcatgctggtggcctccgtgctggccgccgagaacctgtgggtgaccgtgtactacggcgtgcccgtgtggaaggaggccaagaccaccctgttctgcgcctccgacgcccgcgcctacgagaaggaggtgcacaacgtgtgggccacccacgcctgcgtgcccaccgacccctccccccaggagctggtgctgggcaacgtgaccgagaacttcaacatgtggaagaacgacatggtggaccagatgcacgaggacatcatctccctgtgggaccagtccctgaagccctgcgtgaagctgacccccctgtgcgtgaccctgatctgctccgacgccaccgtgaagaccggcaccgtggaggagatgaagaactgctccttcaacaccaccaccgagatccgcgacaaggagaagaaggagtacgccctgttctacaagcccgacatcgtgcccctgtccgagaccaacaacacctccgagtaccgcctgatcaactgcaacacctccgcctgcacccaggcctgccccaaggtgaccttcgagcccatccccatccactactgcgcccccgccggctacgccatcctgaagtgcaacgacgagaccttcaacggcaccggcccctgctccaacgtgtccaccgtgcagtgcacccacggcatccgccccgtggtgtccacccagctgctgctgaacggctccctggccgagaaggagatcgtgatccgctccgagaacctgaccaacaacgccaagatcatcatcgtgcacctgcacacccccgtggagatcgtgtgcacccgccccaacaacaacacccgcaagtccgtgcgcatcggccccggccagaccttctacgccaccggcgacatcatcggcgacatcaagcaggccaggtgcaacatctccgaggagaagtggaacgacaccctgcagaaggtgggcatcgagctgcagaagcacttccccaacaagaccatcaagtacaaccagtccgccggcggcgacatggagatcaccacccactccttcaactgcggcggcgagttcttctactgcaacacctccaacctgttcaacggcacctacaacggcacctacatctccaccaactcctccgccaactccacctccaccatcaccctgcagtgccgcatcaagcagatcatcaacatgtggcagggcgtgggccgctgcatgtacgccccccccatcgccggcaacatcacctgccgctccaacatcaccggcctgctgctgacccgcgacggcggcaccaactccaacgagaccgagaccttccgccccgccggcggcgacatgcgcgacaactggcgctccgagctgtacaagtacaaggtggtgaagatcgagcccctgggcgtggcccccacccgctgcaagcgccgcgtggtgggccgccgccgccgccgccgcgccgtgggcatcggcgccgtgttcctgggcttcctgggcgccgccggctccaccatgggcgccgcctccatgaccctgaccgtgcaggcccgcaacctgctgtccggcatcgtgcagcagcagtccaacctgctgcgcgcccccgaggcccagcagcacctgctgaagctgaccgtgtggggcatcaagcagctgcaggcccgcgtgctggccgtggagcgctacctgcgcgaccagcagctgctgggcatctggggctgctccggcaagctgatctgctgcaccaacgtgccctggaactcctcctggtccaaccgcaacctgtccgagatctgggacaacatgacctggctgcagtgggacaaggagatctccaactacacccagatcatctacggcctgctggaggagtcccagaaccagcaggagaagaacgagcaggacctgctggccctggactgataagcggccgcggatcc

SEQ ID NO: 142 - protein, 646 aa, synthetic construct
MGSLQPLATLYLLGMLVASVLAAENLWVTVYYGVPVWKEAKTTLFCASDARAYEKEVHNVWATHACVPTDPSPQELVLGNVTENFNMWKNDMVDQMHEDIISLWDQSLKPCVKLTPLCVTLICSDATVKTGTVEEMKNCSFNTTTEIRDKEKKEYALFYKPDIVPLSETNNTSEYRLINCNTSACTQACPKVTFEPIPIHYCAPAGYAILKCNDETFNGTGPCSNVSTVQCTHGIRPVVSTQLLLNGSLAEKEIVIRSENLTNNAKIIIVHLHTPVEIVCTRPNNNTRKSVRIGPGQTFYATGDIIGDIKQARCNISEEKWNDTLQKVGIELQKHFPNKTIKYNQSAGGDMEITTHSFNCGGEFFYCNTSNLFNGTYNGTYISTNSSANSTSTITLQCRIKQIINMWQGVGRCMYAPPIAGNITCRSNITGLLLTRDGGTNSNETETFRPAGGDMRDNWRSELYKYKVVKIEPLGVAPTRCKRRVVGRRRRRRAVGIGAVFLGFLGAAGSTMGAASMTLTVQARNLLSGIVQQQSNLLRAPEAQQHLLKLTVWGIKQLQARVLAVERYLRDQQLLGIWGCSGKLICCTNVPWNSSWSNRNLSEIWDNMTWLQWDKEISNYTQIIYGLLEESQNQQEKNEQDLLALD

SEQ ID NO: 143 - DNA, 1981 bp, synthetic construct
  source 1..1981: mol_type = other DNA
gtcgacaagcttcccgggccaccatgggctccctgcagcccctggccaccctgtacctgctgggcatgctggtggcctccgtgctggccgccgagaacctgtgggtgaccgtgtactacggcgtgcccgtgtggaaggaggccaagaccaccctgttctgcgcctccgacgcccgcgcctacgagaaggaggtgcacaacgtgtgggccacccacgcctgcgtgcccaccgacccctccccccaggagctggtgctgggcaacgtgaccgagaacttcaacatgtggaagaacgacatggtggaccagatgcacgaggacatcatctccctgtgggaccagtccctgaagccctgcgtgaagctgacccccctgtgcgtgaccctgatctgctccaacgccaccgtgaagaacggcaccgtggaggagatgaagaactgctccttcaacaccaccaccgagatccgcgacaaggagaagaaggagtacgccctgttctacaagcccgacatcgtgcccctgtccgagaccaacaacacctccgagtaccgcctgatcaactgcaacacctccgcctgcacccaggcctgccccaaggtgaccttcgagcccatccccatccactactgcgcccccgccggctacgccatcctgaagtgcaacgacgagaccttcaacggcaccggcccctgctccaacgtgtccaccgtgcagtgcacccacggcatccgccccgtggtgtccacccagctgctgctgaacggctccctggccgagaaggagatcgtgatccgctccgagaacctgaccaacaacgccaagatcatcatcgtgcacctgcacacccccgtggagatcgtgtgcacccgccccaacaacaacacccgcaagtccgtgcgcatcggccccggccagaccttctacgccaccggcgacatcatcggcgacatcaagcaggcccactgcaacatctccgaggagaagtggaacgacaccctgcagaaggtgggcatcgagctgcagaagcacttccccaacaagaccatcaagtacaaccagtccgccggcggcgacatggagatcaccacccactccttcaactgcggcggcgagttcttctactgcaacacctccaacctgttcaacggcacctacaacggcacctacatctccaccaactcctccgccaactccacctccaccatctccctgcagtgccgcatcaagcagatcatcaacatgtggcagggcgtgggccgctgcatgtacgccccccccatcgccggcaacatcacctgccgctccaacatcaccggcctgctgctgacccgcgacggcggcaccaactccaacgagaccgagaccttccgccccgccggcggcgacatgcgcgacaactggcgctccgagctgtacaagtacaaggtggtgaagatcgagcccctgggcgtggcccccacccgctgcaagcgccgcgtggtgggccgccgccgccgccgccgcgccgtgggcatcggcgccgtgttcctgggcttcctgggcgccgccggctccaccatgggcgccgcctccatgaccctgaccgtgcaggcccgcaacctgctgtccggcatcgtgcagcagcagtccaacctgctgcgcgcccccgaggcccagcagcacctgctgaagctgaccgtgtggggcatcaagcagctgcaggcccgcgtgctggccgtggagcgctacctgcgcgaccagcagctgctgggcatctggggctgctccggcaagctgatctgctgcaccaacgtgccctggaactcctcctggtccaaccgcaacctgtccgagatctgggacaacatgacctggctgcagtgggacaaggagatctccaactacacccagatcatctacggcctgctggaggagtcccagaaccagcaggagaagaacgagcaggacctgctggccctggactgataagcggccgcggatcc

SEQ ID NO: 144 - protein, 646 aa, synthetic construct
MGSLQPLATLYLLGMLVASVLAAENLWVTVYYGVPVWKEAKTTLFCASDARAYEKEVHNVWATHACVPTDPSPQELVLGNVTENFNMWKNDMVDQMHEDIISLWDQSLKPCVKLTPLCVTLICSNATVKNGTVEEMKNCSFNTTTEIRDKEKKEYALFYKPDIVPLSETNNTSEYRLINCNTSACTQACPKVTFEPIPIHYCAPAGYAILKCNDETFNGTGPCSNVSTVQCTHGIRPVVSTQLLLNGSLAEKEIVIRSENLTNNAKIIIVHLHTPVEIVCTRPNNNTRKSVRIGPGQTFYATGDIIGDIKQAHCNISEEKWNDTLQKVGIELQKHFPNKTIKYNQSAGGDMEITTHSFNCGGEFFYCNTSNLFNGTYNGTYISTNSSANSTSTISLQCRIKQIINMWQGVGRCMYAPPIAGNITCRSNITGLLLTRDGGTNSNETETFRPAGGDMRDNWRSELYKYKVVKIEPLGVAPTRCKRRVVGRRRRRRAVGIGAVFLGFLGAAGSTMGAASMTLTVQARNLLSGIVQQQSNLLRAPEAQQHLLKLTVWGIKQLQARVLAVERYLRDQQLLGIWGCSGKLICCTNVPWNSSWSNRNLSEIWDNMTWLQWDKEISNYTQIIYGLLEESQNQQEKNEQDLLALD

SEQ ID NO: 145 - DNA, 1981 bp, synthetic construct
  source 1..1981: mol_type = other DNA
gtcgacaagcttcccgggccaccatgggctccctgcagcccctggccaccctgtacctgctgggcatgctggtggcctccgtgctggccgccgagaacctgtgggtgaccgtgtactacggcgtgcccgtgtggaaggaggccaagaccaccctgttctgcgcctccgacgcccgcgcctacgagaaggaggtgcacaacgtgtgggccacccacgcctgcgtgcccaccgacccctccccccaggagctggtgctgggcaacgtgaccgagaacttcaacatgtggaagaacgacatggtggaccagatgcacgaggacatcatctccctgtgggaccagtccctgaagccctgcgtgaagctgacccccctgtgcgtgaccctgatctgctccaacgccaccgtgaagaacggcaccgtggaggagatgaagaactgctccttcaacaccaccaccgagatccgcgacaaggagaagaaggagtacgccctgttctacaagcccgacatcgtgcccctgtccgagaccaacaacacctccgagtaccgcctgatcaactgcaacacctccgcctgcacccaggcctgccccaaggtgaccttcgagcccatccccatccactactgcgcccccgccggctacgccatcctgaagtgcaacgacgagaccttcaacggcaccggcccctgctccaacgtgtccaccgtgcagtgcacccacggcatccgccccgtggtgtccacccagctgctgctgaacggctccctggccgagaaggagatcgtgatccgctccgagaacctgaccaacaacgccaagatcatcatcgtgcacctgcacaagcccgtgacgatcgtgtgcacccgccccaacaacaacacccgcaagtccgtgcgcatcggccccggccagaccttctacgccaccggcgacatcatcggcgacatcaagcaggcccactgcaacatctccgaggagaagtggaacgacaccctgcagaaggtgggcatcgagctgcagaagcacttccccaacaagaccatcaagtacaaccagtccgccggcggcgacatggagatcaccacccactccttcaactgcggcggcgagttcttctactgcaacacctccaacctgttcaacggcacctacaacggcacctacatctccaccaactcctccgccaagtccacctccaccatctccctgcagtgccgcatcaagcagatcatcaacatgtggcagggcgtgggccgctgcatgtacgccccccccatcgccggcgccatcacctgccgctccaacatcaccggcctgctgctgacccgcgacggcggcaccaactccaacgagaccgagaccttccgccccgccggcggcgacatgcgcgacaactggcgctccgagctgtacaagtacaaggtggtgaagatcgagcccctgggcgtggcccccacccgctgcaagcgccgcgtggtgggccgccgccgccgccgccgcgccgtgggcatcggcgccgtgttcctgggcttcctgggcgccgccggctccaccatgggcgccgcctccatgaccctgaccgtgcaggcccgcaacctgctgtccggcatcgtgcagcagcagtccaacctgctgcgcgcccccgaggcccagcagcacctgctgaagctgaccgtgtggggcatcaagcagctgcaggcccgcgtgctggccgtggagcgctacctgcgcgaccagcagctgctgggcatctggggctgctccggcaagctgatctgctgcaccaacgtgccctggaactcctcctggtccaaccgcaacctgtccgagatctgggacaacatgacctggctgcagtgggacaaggagatctccaactacacccagatcatctacggcctgctggaggagtcccagaaccagcaggagaagaacgagcaggacctgctggccctggactgataagcggccgcggatcc

SEQ ID NO: 146 - protein, 646 aa, synthetic construct
MGSLQPLATLYLLGMLVASVLAAENLWVTVYYGVPVWKEAKTTLFCASDARAYEKEVHNVWATHACVPTDPSPQELVLGNVTENFNMWKNDMVDQMHEDIISLWDQSLKPCVKLTPLCVTLICSNATVKNGTVEEMKNCSFNTTTEIRDKEKKEYALFYKPDIVPLSETNNTSEYRLINCNTSACTQACPKVTFEPIPIHYCAPAGYAILKCNDETFNGTGPCSNVSTVQCTHGIRPVVSTQLLLNGSLAEKEIVIRSENLTNNAKIIIVHLHKPVTIVCTRPNNNTRKSVRIGPGQTFYATGDIIGDIKQAHCNISEEKWNDTLQKVGIELQKHFPNKTIKYNQSAGGDMEITTHSFNCGGEFFYCNTSNLFNGTYNGTYISTNSSAKSTSTISLQCRIKQIINMWQGVGRCMYAPPIAGAITCRSNITGLLLTRDGGTNSNETETFRPAGGDMRDNWRSELYKYKVVKIEPLGVAPTRCKRRVVGRRRRRRAVGIGAVFLGFLGAAGSTMGAASMTLTVQARNLLSGIVQQQSNLLRAPEAQQHLLKLTVWGIKQLQARVLAVERYLRDQQLLGIWGCSGKLICCTNVPWNSSWSNRNLSEIWDNMTWLQWDKEISNYTQIIYGLLEESQNQQEKNEQDLLALD

SEQ ID NO: 147 - DNA, 1981 bp, synthetic construct
  source 1..1981: mol_type = other DNA
gtcgacaagcttcccgggccaccatgggctccctgcagcccctggccaccctgtacctgctgggcatgctggtggcctccgtgctggccgccgagaacctgtgggtgaccgtgtactacggcgtgcccgtgtggaaggaggccaagaccaccctgttctgcgcctccgacgcccgcgcctacgagaaggaggtgcacaacgtgtgggccacccacgcctgcgtgcccaccgacccctccccccaggagctggtgctgggcaacgtgaccgagaacttcaacatgtggaagaacgacatggtggaccagatgcacgaggacatcatctccctgtgggaccagtccctgaagccctgcgtgaagctgacccccctgtgcgtgaccctgatctgctccgacgccaccgtgaagaccggcaccgtggaggagatgaagaactgctccttcaacaccaccaccgagatccgcgacaaggagaagaaggagtacgccctgttctacaagcccgacatcgtgcccctgtccgagaccaacaacacctccgagtaccgcctgatcaactgcaacacctccgcctgcacccaggcctgccccaaggtgaccttcgagcccatccccatccactactgcgcccccgccggctacgccatcctgaagtgcaacgacgagaccttcaacggcaccggcccctgctccaacgtgtccaccgtgcagtgcacccacggcatccgccccgtggtgtccacccagctgctgctgaacggctccctggccgagaaggagatcgtgatccgctccgagaacctgaccaacaacgccaagatcatcatcgtgcacctgcacacccccgtggagatcgtgtgcacccgccccaacaacaacacccgcaagtccgtgcgcatcggccccggccagaccttctacgccaccggcgacatcatcggcgacatcaagcaggcccactgcaacatctccgaggagaagtggaacgacaccctgcagaaggtgggcatcgagctgcagaagcacttccccaacaagaccatcaagtacaaccagtccgccggcggcgacatggagatcaccacccactccttcaactgcggcggcgagttcttctactgcaacacctccaacctgttcaacggcacctacaacggcacctacatctccaccaactcctccgccaactccacctccaccatctccctgcagtgccgcatcaagcagatcatcaacatgtggcagggcgtgggccgctgcatgtacgccccccccatcgccggcaacatcacctgccgctccaacatcaccggcctgctgctgacccgcgacggcggcaccaactccaacgagaccgagaccttccgccccgccggcggcgacatgcgcgacaactggcgctccgagctgtacaagtacaaggtggtgaagatcgagcccctgggcgtggcccccacccgctgcaagcgccgcgtggtgggccgccgccgccgccgccgcgccgtgggcatcggcgccgtgttcctgggcttcctgggcgccgccggctccaccatgggcgccgcctccatgaccctgaccgtgcaggcccgcaacctgctgtccggcatcgtgcagcagcagtccaacctgctgcgcgcccccgaggcccagcagcacctgctgaagctgaccgtgtggggcatcaagcagctgcaggcccgcgtgctggccgtggagcgctacctgcgcgaccagcagctgctgggcatctggggctgctccggcaagctgatctgctgcaccaacgtgccctggaactcctcctggtccaaccgcaacctgtccgagatctgggacaacatgacctggctgcagtgggacaaggagatctccaactacacccagatcatctacggcctgctggaggagtcccagaaccagcaggagaagaacgagcaggacctgctggccctggactgataagcggccgcggatcc

SEQ ID NO: 148 - protein, 646 aa, synthetic construct
MGSLQPLATLYLLGMLVASVLAAENLWVTVYYGVPVWKEAKTTLFCASDARAYEKEVHNVWATHACVPTDPSPQELVLGNVTENFNMWKNDMVDQMHEDIISLWDQSLKPCVKLTPLCVTLICSDATVKTGTVEEMKNCSFNTTTEIRDKEKKEYALFYKPDIVPLSETNNTSEYRLINCNTSACTQACPKVTFEPIPIHYCAPAGYAILKCNDETFNGTGPCSNVSTVQCTHGIRPVVSTQLLLNGSLAEKEIVIRSENLTNNAKIIIVHLHTPVEIVCTRPNNNTRKSVRIGPGQTFYATGDIIGDIKQAHCNISEEKWNDTLQKVGIELQKHFPNKTIKYNQSAGGDMEITTHSFNCGGEFFYCNTSNLFNGTYNGTYISTNSSANSTSTISLQCRIKQIINMWQGVGRCMYAPPIAGNITCRSNITGLLLTRDGGTNSNETETFRPAGGDMRDNWRSELYKYKVVKIEPLGVAPTRCKRRVVGRRRRRRAVGIGAVFLGFLGAAGSTMGAASMTLTVQARNLLSGIVQQQSNLLRAPEAQQHLLKLTVWGIKQLQARVLAVERYLRDQQLLGIWGCSGKLICCTNVPWNSSWSNRNLSEIWDNMTWLQWDKEISNYTQIIYGLLEESQNQQEKNEQDLLALD

SEQ ID NO: 149 - DNA, 1981 bp, synthetic construct
  source 1..1981: mol_type = other DNA
gtcgacaagcttcccgggccaccatgggctccctgcagcccctggccaccctgtacctgctgggcatgctggtggcctccgtgctggccgccgagaacctgtgggtgaccgtgtactacggcgtgcccgtgtggaaggaggccaagaccaccctgttctgcgcctccgacgcccgcgcctacgagaaggaggtgcacaacgtgtgggccacccacgcctgcgtgcccaccgacccctccccccaggagctggtgctgggcaacgtgaccgagaacttcaacatgtggaagaacgacatggtggaccagatgcacgaggacatcatctccctgtgggaccagtccctgaagccctgcgtgaagctgacccccctgtgcgtgaccctgatctgctccaacgccaccgtgaagaacggcaccgtggaggagatgaagaactgctccttcaacaccaccaccgagatccgcgacaaggagaagaaggagtacgccctgttctacaagcccgacatcgtgcccctgtccgagaccaacaacacctccgagtaccgcctgatcaactgcaacacctccgcctgcacccaggcctgccccaaggtgaccttcgagcccatccccatccactactgcgcccccgccggctacgccatcctgaagtgcaacgacgagaccttcaacggcaccggcccctgctccaacgtgtccaccgtgcagtgcacccacggcatccgccccgtggtgtccacccagctgctgctgaacggctccctggccgagaaggagatcgtgatccgctccgagaacctgaccaacaacgccaagatcatcatcgtgcacctgcacacccccgtggagatcgtgtgcacccgccccaacaacaacacccgcaagtccgtgcgcatcggccccggccagaccttctacgccaccggcgacatcatcggcgacatcaagcaggcccactgcaacatctccgaggagaagtggaacgacaccctgcagaaggtgggcatcgagctgcagaagcacttccccaacaagaccatcaagtacaaccagtccgccggcggcgacatggagatcaccacccactccttcaactgcggcggcgagttcttctactgcaacacctccaacctgttcaacggcacctacaacggcacctacatctccaccaactcctccgccaactccacctccaccatcaacctgcagtgccgcatcaagcagatcatcaacatgtggcagggcgtgggccgctgcatgtacgccccccccatcgccggcaacatcacctgccgctccaacatcaccggcctgctgctgacccgcgacggcggcaccaactccaacgagaccgagaccttccgccccgccggcggcgacatgcgcgacaactggcgctccgagctgtacaagtacaaggtggtgaagatcgagcccctgggcgtggcccccacccgctgcaagcgccgcgtggtgggccgccgccgccgccgccgcgccgtgggcatcggcgccgtgttcctgggcttcctgggcgccgccggctccaccatgggcgccgcctccatgaccctgaccgtgcaggcccgcaacctgctgtccggcatcgtgcagcagcagtccaacctgctgcgcgcccccgaggcccagcagcacctgctgaagctgaccgtgtggggcatcaagcagctgcaggcccgcgtgctggccgtggagcgctacctgcgcgaccagcagctgctgggcatctggggctgctccggcaagctgatctgctgcaccaacgtgccctggaactcctcctggtccaaccgcaacctgtccgagatctgggacaacatgacctggctgcagtgggacaaggagatctccaactacacccagatcatctacggcctgctggaggagtcccagaaccagcaggagaagaacgagcaggacctgctggccctggactgataagcggccgcggatcc

SEQ ID NO: 150 - protein, 646 aa, synthetic construct
MGSLQPLATLYLLGMLVASVLAAENLWVTVYYGVPVWKEAKTTLFCASDARAYEKEVHNVWATHACVPTDPSPQELVLGNVTENFNMWKNDMVDQMHEDIISLWDQSLKPCVKLTPLCVTLICSNATVKNGTVEEMKNCSFNTTTEIRDKEKKEYALFYKPDIVPLSETNNTSEYRLINCNTSACTQACPKVTFEPIPIHYCAPAGYAILKCNDETFNGTGPCSNVSTVQCTHGIRPVVSTQLLLNGSLAEKEIVIRSENLTNNAKIIIVHLHTPVEIVCTRPNNNTRKSVRIGPGQTFYATGDIIGDIKQAHCNISEEKWNDTLQKVGIELQKHFPNKTIKYNQSAGGDMEITTHSFNCGGEFFYCNTSNLFNGTYNGTYISTNSSANSTSTINLQCRIKQIINMWQGVGRCMYAPPIAGNITCRSNITGLLLTRDGGTNSNETETFRPAGGDMRDNWRSELYKYKVVKIEPLGVAPTRCKRRVVGRRRRRRAVGIGAVFLGFLGAAGSTMGAASMTLTVQARNLLSGIVQQQSNLLRAPEAQQHLLKLTVWGIKQLQARVLAVERYLRDQQLLGIWGCSGKLICCTNVPWNSSWSNRNLSEIWDNMTWLQWDKEISNYTQIIYGLLEESQNQQEKNEQDLLALD

SEQ ID NO: 151 - DNA, 1981 bp, synthetic construct
  source 1..1981: mol_type = other DNA
gtcgacaagcttcccgggccaccatgggctccctgcagcccctggccaccctgtacctgctgggcatgctggtggcctccgtgctggccgccgagaacctgtgggtgaccgtgtactacggcgtgcccgtgtggaaggaggccaagaccaccctgttctgcgcctccgacgcccgcgcctacgagaaggaggtgcacaacgtgtgggccacccacgcctgcgtgcccaccgacccctccccccaggagctggtgctgggcaacgtgaccgagaacttcaacatgtggaagaacgacatggtggaccagatgcacgaggacatcatctccctgtgggaccagtccctgaagccctgcgtgaagctgacccccctgtgcgtgaccctgatctgctccaacgccaccgtgaagaacggcaccgtggaggagatgaagaactgctccttcaacaccaccaccgagatccgcgacaaggagaagaaggagtacgccctgttctacaagcccgacatcgtgcccctgtccgagaccaacaacacctccgagtaccgcctgatcaactgcaacacctccgcctgcacccaggcctgccccaaggtgaccttcgagcccatccccatccactactgcgcccccgccggctacgccatcctgaagtgcaacgacgagaccttcaacggcaccggcccctgctccaacgtgtccaccgtgcagtgcacccacggcatccgccccgtggtgtccacccagctgctgctgaacggctccctggccgagaaggagatcgtgatccgctccgagaacctgaccaacaacgccaagatcatcatcgtgcacctgcacaagcccgtgacgatcgtgtgcacccgccccaacaacaacacccgcaagtccgtgcgcatcggccccggccagaccttctacgccaccggcgacatcatcggcgacatcaagcaggcccactgcaacatctccgaggagaagtggaacgacaccctgcagaaggtgggcatcgagctgcagaagcacttccccaacaagaccatcaagtacaaccagtccgccggcggcgacatggagatcaccacccactccttcaactgcggcggcgagttcttctactgcaacacctccaacctgttcaacggcacctacaacggcacctacatctccaccaactcctccgccaagtccacctccaccatcaacctgcagtgccgcatcaagcagatcatcaacatgtggcagggcgtgggccgctgcatgtacgccccccccatcgccggcgccatcacctgccgctccaacatcaccggcctgctgctgacccgcgacggcggcaccaactccaacgagaccgagaccttccgccccgccggcggcgacatgcgcgacaactggcgctccgagctgtacaagtacaaggtggtgaagatcgagcccctgggcgtggcccccacccgctgcaagcgccgcgtggtgggccgccgccgccgccgccgcgccgtgggcatcggcgccgtgttcctgggcttcctgggcgccgccggctccaccatgggcgccgcctccatgaccctgaccgtgcaggcccgcaacctgctgtccggcatcgtgcagcagcagtccaacctgctgcgcgcccccgaggcccagcagcacctgctgaagctgaccgtgtggggcatcaagcagctgcaggcccgcgtgctggccgtggagcgctacctgcgcgaccagcagctgctgggcatctggggctgctccggcaagctgatctgctgcaccaacgtgccctggaactcctcctggtccaaccgcaacctgtccgagatctgggacaacatgacctggctgcagtgggacaaggagatctccaactacacccagatcatctacggcctgctggaggagtcccagaaccagcaggagaagaacgagcaggacctgctggccctggactgataagcggccgcggatcc

SEQ ID NO: 152 - protein, 646 aa, synthetic construct
MGSLQPLATLYLLGMLVASVLAAENLWVTVYYGVPVWKEAKTTLFCASDARAYEKEVHNVWATHACVPTDPSPQELVLGNVTENFNMWKNDMVDQMHEDIISLWDQSLKPCVKLTPLCVTLICSNATVKNGTVEEMKNCSFNTTTEIRDKEKKEYALFYKPDIVPLSETNNTSEYRLINCNTSACTQACPKVTFEPIPIHYCAPAGYAILKCNDETFNGTGPCSNVSTVQCTHGIRPVVSTQLLLNGSLAEKEIVIRSENLTNNAKIIIVHLHKPVTIVCTRPNNNTRKSVRIGPGQTFYATGDIIGDIKQAHCNISEEKWNDTLQKVGIELQKHFPNKTIKYNQSAGGDMEITTHSFNCGGEFFYCNTSNLFNGTYNGTYISTNSSAKSTSTINLQCRIKQIINMWQGVGRCMYAPPIAGAITCRSNITGLLLTRDGGTNSNETETFRPAGGDMRDNWRSELYKYKVVKIEPLGVAPTRCKRRVVGRRRRRRAVGIGAVFLGFLGAAGSTMGAASMTLTVQARNLLSGIVQQQSNLLRAPEAQQHLLKLTVWGIKQLQARVLAVERYLRDQQLLGIWGCSGKLICCTNVPWNSSWSNRNLSEIWDNMTWLQWDKEISNYTQIIYGLLEESQNQQEKNEQDLLALD

SEQ ID NO: 153 - DNA, 1981 bp, synthetic construct
  source 1..1981: mol_type = other DNA
gtcgacaagcttcccgggccaccatgggctccctgcagcccctggccaccctgtacctgctgggcatgctggtggcctccgtgctggccgccgagaacctgtgggtgaccgtgtactacggcgtgcccgtgtggaaggaggccaagaccaccctgttctgcgcctccgacgcccgcgcctacgagaaggaggtgcacaacgtgtgggccacccacgcctgcgtgcccaccgacccctccccccaggagctggtgctgggcaacgtgaccgagaacttcaacatgtggaagaacgacatggtggaccagatgcacgaggacatcatctccctgtgggaccagtccctgaagccctgcgtgaagctgacccccctgtgcgtgaccctgatctgctccgacgccaccgtgaagaccggcaccgtggaggagatgaagaactgctccttcaacaccaccaccgagatccgcgacaaggagaagaaggagtacgccctgttctacaagcccgacatcgtgcccctgtccgagaccaacaacacctccgagtaccgcctgatcaactgcaacacctccgcctgcacccaggcctgccccaaggtgaccttcgagcccatccccatccactactgcgcccccgccggctacgccatcctgaagtgcaacgacgagaccttcaacggcaccggcccctgctccaacgtgtccaccgtgcagtgcacccacggcatccgccccgtggtgtccacccagctgctgctgaacggctccctggccgagaaggagatcgtgatccgctccgagaacctgaccaacaacgccaagatcatcatcgtgcacctgcacacccccgtggagatcgtgtgcacccgccccaacaacaacacccgcaagtccgtgcgcatcggccccggccagaccttctacgccaccggcgacatcatcggcgacatcaagcaggcccactgcaacatctccgaggagaagtggaacgacaccctgcagaaggtgggcatcgagctgcagaagcacttccccaacaagaccatcaagtacaaccagtccgccggcggcgacatggagatcaccacccactccttcaactgcggcggcgagttcttctactgcaacacctccaacctgttcaacggcacctacaacggcacctacatctccaccaactcctccgccaactccacctccaccatcaacctgcagtgccgcatcaagcagatcatcaacatgtggcagggcgtgggccgctgcatgtacgccccccccatcgccggcaacatcacctgccgctccaacatcaccggcctgctgctgacccgcgacggcggcaccaactccaacgagaccgagaccttccgccccgccggcggcgacatgcgcgacaactggcgctccgagctgtacaagtacaaggtggtgaagatcgagcccctgggcgtggcccccacccgctgcaagcgccgcgtggtgggccgccgccgccgccgccgcgccgtgggcatcggcgccgtgttcctgggcttcctgggcgccgccggctccaccatgggcgccgcctccatgaccctgaccgtgcaggcccgcaacctgctgtccggcatcgtgcagcagcagtccaacctgctgcgcgcccccgaggcccagcagcacctgctgaagctgaccgtgtggggcatcaagcagctgcaggcccgcgtgctggccgtggagcgctacctgcgcgaccagcagctgctgggcatctggggctgctccggcaagctgatctgctgcaccaacgtgccctggaactcctcctggtccaaccgcaacctgtccgagatctgggacaacatgacctggctgcagtgggacaaggagatctccaactacacccagatcatctacggcctgctggaggagtcccagaaccagcaggagaagaacgagcaggacctgctggccctggactgataagcggccgcggatcc

SEQ ID NO: 154 - protein, 646 aa, synthetic construct
MGSLQPLATLYLLGMLVASVLAAENLWVTVYYGVPVWKEAKTTLFCASDARAYEKEVHNVWATHACVPTDPSPQELVLGNVTENFNMWKNDMVDQMHEDIISLWDQSLKPCVKLTPLCVTLICSDATVKTGTVEEMKNCSFNTTTEIRDKEKKEYALFYKPDIVPLSETNNTSEYRLINCNTSACTQACPKVTFEPIPIHYCAPAGYAILKCNDETFNGTGPCSNVSTVQCTHGIRPVVSTQLLLNGSLAEKEIVIRSENLTNNAKIIIVHLHTPVEIVCTRPNNNTRKSVRIGPGQTFYATGDIIGDIKQAHCNISEEKWNDTLQKVGIELQKHFPNKTIKYNQSAGGDMEITTHSFNCGGEFFYCNTSNLFNGTYNGTYISTNSSANSTSTINLQCRIKQIINMWQGVGRCMYAPPIAGNITCRSNITGLLLTRDGGTNSNETETFRPAGGDMRDNWRSELYKYKVVKIEPLGVAPTRCKRRVVGRRRRRRAVGIGAVFLGFLGAAGSTMGAASMTLTVQARNLLSGIVQQQSNLLRAPEAQQHLLKLTVWGIKQLQARVLAVERYLRDQQLLGIWGCSGKLICCTNVPWNSSWSNRNLSEIWDNMTWLQWDKEISNYTQIIYGLLEESQNQQEKNEQDLLALD

SEQ ID NO: 155 - DNA, 1981 bp, synthetic construct
  source 1..1981: mol_type = other DNA
gtcgacaagcttcccgggccaccatgggctccctgcagcccctggccaccctgtacctgctgggcatgctggtggcctccgtgctggccgccgagaacctgtgggtgaccgtgtactacggcgtgcccgtgtggaaggaggccaagaccaccctgttctgcgcctccgacgcccgcgcctacgagaaggaggtgcacaacgtgtgggccacccacgcctgcgtgcccaccgacccctccccccaggagctggtgctgggcaacgtgaccgagaacttcaacatgtggaagaacgacatggtggaccagatgcacgaggacatcatctccctgtgggaccagtccctgaagccctgcgtgaagctgacccccctgtgcgtgaccctgatctgctccaacgccaccgtgaagaacggcaccgtggaggagatgaagaactgctccttcaacaccaccaccgagatccgcgacaaggagaagaaggagtacgccctgttctacaagcccgacatcgtgcccctgtccgagaccaacaacacctccgagtaccgcctgatcaactgcaacacctccgcctgcacccaggcctgccccaaggtgaccttcgagcccatccccatccactactgcgcccccgccggctacgccatcctgaagtgcaacgacgagaccttcaacggcaccggcccctgctccaacgtgtccaccgtgcagtgcacccacggcatccgccccgtggtgtccacccagctgctgctgaacggctccctggccgagaaggagatcgtgatccgctccgagaacctgaccaacaacgccaagatcatcatcgtgcacctgcacacccccgtggagatcgtgtgcacccgccccaacaacaacacccgcaagtccgtgcgcatcggccccggccagaccttctacgccaccggcgacatcatcggcgacatcaagcaggcccactgcaacatctccgaggagaagtggaacgacaccctgcagaaggtgggcatcgagctgcagaagcacttccccaacaagaccatcaagtacaaccagtccgccggcggcgacatggagatcaccacccactccttcaactgcggcggcgagttcttctactgcaacacctccaacctgttcaacggcacctacaacggcacctacatctccaccaactcctccgccaactccacctccaccatcgccctgcagtgccgcatcaagcagatcatcaacatgtggcagggcgtgggccgctgcatgtacgccccccccatcgccggcaacatcacctgccgctccaacatcaccggcctgctgctgacccgcgacggcggcaccaactccaacgagaccgagaccttccgccccgccggcggcgacatgcgcgacaactggcgctccgagctgtacaagtacaaggtggtgaagatcgagcccctgggcgtggcccccacccgctgcaagcgccgcgtggtgggccgccgccgccgccgccgcgccgtgggcatcggcgccgtgttcctgggcttcctgggcgccgccggctccaccatgggcgccgcctccatgaccctgaccgtgcaggcccgcaacctgctgtccggcatcgtgcagcagcagtccaacctgctgcgcgcccccgaggcccagcagcacctgctgaagctgaccgtgtggggcatcaagcagctgcaggcccgcgtgctggccgtggagcgctacctgcgcgaccagcagctgctgggcatctggggctgctccggcaagctgatctgctgcaccaacgtgccctggaactcctcctggtccaaccgcaacctgtccgagatctgggacaacatgacctggctgcagtgggacaaggagatctccaactacacccagatcatctacggcctgctggaggagtcccagaaccagcaggagaagaacgagcaggacctgctggccctggactgataagcggccgcggatcc

SEQ ID NO: 156 - protein, 646 aa, synthetic construct
MGSLQPLATLYLLGMLVASVLAAENLWVTVYYGVPVWKEAKTTLFCASDARAYEKEVHNVWATHACVPTDPSPQELVLGNVTENFNMWKNDMVDQMHEDIISLWDQSLKPCVKLTPLCVTLICSNATVKNGTVEEMKNCSFNTTTEIRDKEKKEYALFYKPDIVPLSETNNTSEYRLINCNTSACTQACPKVTFEPIPIHYCAPAGYAILKCNDETFNGTGPCSNVSTVQCTHGIRPVVSTQLLLNGSLAEKEIVIRSENLTNNAKIIIVHLHTPVEIVCTRPNNNTRKSVRIGPGQTFYATGDIIGDIKQAHCNISEEKWNDTLQKVGIELQKHFPNKTIKYNQSAGGDMEITTHSFNCGGEFFYCNTSNLFNGTYNGTYISTNSSANSTSTIALQCRIKQIINMWQGVGRCMYAPPIAGNITCRSNITGLLLTRDGGTNSNETETFRPAGGDMRDNWRSELYKYKVVKIEPLGVAPTRCKRRVVGRRRRRRAVGIGAVFLGFLGAAGSTMGAASMTLTVQARNLLSGIVQQQSNLLRAPEAQQHLLKLTVWGIKQLQARVLAVERYLRDQQLLGIWGCSGKLICCTNVPWNSSWSNRNLSEIWDNMTWLQWDKEISNYTQIIYGLLEESQNQQEKNEQDLLALD

SEQ ID NO: 157 - DNA, 1981 bp, synthetic construct
  source 1..1981: mol_type = other DNA
gtcgacaagcttcccgggccaccatgggctccctgcagcccctggccaccctgtacctgctgggcatgctggtggcctccgtgctggccgccgagaacctgtgggtgaccgtgtactacggcgtgcccgtgtggaaggaggccaagaccaccctgttctgcgcctccgacgcccgcgcctacgagaaggaggtgcacaacgtgtgggccacccacgcctgcgtgcccaccgacccctccccccaggagctggtgctgggcaacgtgaccgagaacttcaacatgtggaagaacgacatggtggaccagatgcacgaggacatcatctccctgtgggaccagtccctgaagccctgcgtgaagctgacccccctgtgcgtgaccctgatctgctccaacgccaccgtgaagaacggcaccgtggaggagatgaagaactgctccttcaacaccaccaccgagatccgcgacaaggagaagaaggagtacgccctgttctacaagcccgacatcgtgcccctgtccgagaccaacaacacctccgagtaccgcctgatcaactgcaacacctccgcctgcacccaggcctgccccaaggtgaccttcgagcccatccccatccactactgcgcccccgccggctacgccatcctgaagtgcaacgacgagaccttcaacggcaccggcccctgctccaacgtgtccaccgtgcagtgcacccacggcatccgccccgtggtgtccacccagctgctgctgaacggctccctggccgagaaggagatcgtgatccgctccgagaacctgaccaacaacgccaagatcatcatcgtgcacctgcacaagcccgtgacgatcgtgtgcacccgccccaacaacaacacccgcaagtccgtgcgcatcggccccggccagaccttctacgccaccggcgacatcatcggcgacatcaagcaggcccactgcaacatctccgaggagaagtggaacgacaccctgcagaaggtgggcatcgagctgcagaagcacttccccaacaagaccatcaagtacaaccagtccgccggcggcgacatggagatcaccacccactccttcaactgcggcggcgagttcttctactgcaacacctccaacctgttcaacggcacctacaacggcacctacatctccaccaactcctccgccaagtccacctccaccatcgccctgcagtgccgcatcaagcagatcatcaacatgtggcagggcgtgggccgctgcatgtacgccccccccatcgccggcgccatcacctgccgctccaacatcaccggcctgctgctgacccgcgacggcggcaccaactccaacgagaccgagaccttccgccccgccggcggcgacatgcgcgacaactggcgctccgagctgtacaagtacaaggtggtgaagatcgagcccctgggcgtggcccccacccgctgcaagcgccgcgtggtgggccgccgccgccgccgccgcgccgtgggcatcggcgccgtgttcctgggcttcctgggcgccgccggctccaccatgggcgccgcctccatgaccctgaccgtgcaggcccgcaacctgctgtccggcatcgtgcagcagcagtccaacctgctgcgcgcccccgaggcccagcagcacctgctgaagctgaccgtgtggggcatcaagcagctgcaggcccgcgtgctggccgtggagcgctacctgcgcgaccagcagctgctgggcatctggggctgctccggcaagctgatctgctgcaccaacgtgccctggaactcctcctggtccaaccgcaacctgtccgagatctgggacaacatgacctggctgcagtgggacaaggagatctccaactacacccagatcatctacggcctgctggaggagtcccagaaccagcaggagaagaacgagcaggacctgctggccctggactgataagcggccgcggatcc

SEQ ID NO: 158 - protein, 646 aa, synthetic construct
MGSLQPLATLYLLGMLVASVLAAENLWVTVYYGVPVWKEAKTTLFCASDARAYEKEVHNVWATHACVPTDPSPQELVLGNVTENFNMWKNDMVDQMHEDIISLWDQSLKPCVKLTPLCVTLICSNATVKNGTVEEMKNCSFNTTTEIRDKEKKEYALFYKPDIVPLSETNNTSEYRLINCNTSACTQACPKVTFEPIPIHYCAPAGYAILKCNDETFNGTGPCSNVSTVQCTHGIRPVVSTQLLLNGSLAEKEIVIRSENLTNNAKIIIVHLHKPVTIVCTRPNNNTRKSVRIGPGQTFYATGDIIGDIKQAHCNISEEKWNDTLQKVGIELQKHFPNKTIKYNQSAGGDMEITTHSFNCGGEFFYCNTSNLFNGTYNGTYISTNSSAKSTSTIALQCRIKQIINMWQGVGRCMYAPPIAGAITCRSNITGLLLTRDGGTNSNETETFRPAGGDMRDNWRSELYKYKVVKIEPLGVAPTRCKRRVVGRRRRRRAVGIGAVFLGFLGAAGSTMGAASMTLTVQARNLLSGIVQQQSNLLRAPEAQQHLLKLTVWGIKQLQARVLAVERYLRDQQLLGIWGCSGKLICCTNVPWNSSWSNRNLSEIWDNMTWLQWDKEISNYTQIIYGLLEESQNQQEKNEQDLLALD

SEQ ID NO: 159 - DNA, 1981 bp, synthetic construct
  source 1..1981: mol_type = other DNA
gtcgacaagcttcccgggccaccatgggctccctgcagcccctggccaccctgtacctgctgggcatgctggtggcctccgtgctggccgccgagaacctgtgggtgaccgtgtactacggcgtgcccgtgtggaaggaggccaagaccaccctgttctgcgcctccgacgcccgcgcctacgagaaggaggtgcacaacgtgtgggccacccacgcctgcgtgcccaccgacccctccccccaggagctggtgctgggcaacgtgaccgagaacttcaacatgtggaagaacgacatggtggaccagatgcacgaggacatcatctccctgtgggaccagtccctgaagccctgcgtgaagctgacccccctgtgcgtgaccctgatctgctccgacgccaccgtgaagaccggcaccgtggaggagatgaagaactgctccttcaacaccaccaccgagatccgcgacaaggagaagaaggagtacgccctgttctacaagcccgacatcgtgcccctgtccgagaccaacaacacctccgagtaccgcctgatcaactgcaacacctccgcctgcacccaggcctgccccaaggtgaccttcgagcccatccccatccactactgcgcccccgccggctacgccatcctgaagtgcaacgacgagaccttcaacggcaccggcccctgctccaacgtgtccaccgtgcagtgcacccacggcatccgccccgtggtgtccacccagctgctgctgaacggctccctggccgagaaggagatcgtgatccgctccgagaacctgaccaacaacgccaagatcatcatcgtgcacctgcacacccccgtggagatcgtgtgcacccgccccaacaacaacacccgcaagtccgtgcgcatcggccccggccagaccttctacgccaccggcgacatcatcggcgacatcaagcaggcccactgcaacatctccgaggagaagtggaacgacaccctgcagaaggtgggcatcgagctgcagaagcacttccccaacaagaccatcaagtacaaccagtccgccggcggcgacatggagatcaccacccactccttcaactgcggcggcgagttcttctactgcaacacctccaacctgttcaacggcacctacaacggcacctacatctccaccaactcctccgccaactccacctccaccatcgccctgcagtgccgcatcaagcagatcatcaacatgtggcagggcgtgggccgctgcatgtacgccccccccatcgccggcaacatcacctgccgctccaacatcaccggcctgctgctgacccgcgacggcggcaccaactccaacgagaccgagaccttccgccccgccggcggcgacatgcgcgacaactggcgctccgagctgtacaagtacaaggtggtgaagatcgagcccctgggcgtggcccccacccgctgcaagcgccgcgtggtgggccgccgccgccgccgccgcgccgtgggcatcggcgccgtgttcctgggcttcctgggcgccgccggctccaccatgggcgccgcctccatgaccctgaccgtgcaggcccgcaacctgctgtccggcatcgtgcagcagcagtccaacctgctgcgcgcccccgaggcccagcagcacctgctgaagctgaccgtgtggggcatcaagcagctgcaggcccgcgtgctggccgtggagcgctacctgcgcgaccagcagctgctgggcatctggggctgctccggcaagctgatctgctgcaccaacgtgccctggaactcctcctggtccaaccgcaacctgtccgagatctgggacaacatgacctggctgcagtgggacaaggagatctccaactacacccagatcatctacggcctgctggaggagtcccagaaccagcaggagaagaacgagcaggacctgctggccctggactgataagcggccgcggatcc

SEQ ID NO: 160 - protein, 646 aa, synthetic construct
MGSLQPLATLYLLGMLVASVLAAENLWVTVYYGVPVWKEAKTTLFCASDARAYEKEVHNVWATHACVPTDPSPQELVLGNVTENFNMWKNDMVDQMHEDIISLWDQSLKPCVKLTPLCVTLICSDATVKTGTVEEMKNCSFNTTTEIRDKEKKEYALFYKPDIVPLSETNNTSEYRLINCNTSACTQACPKVTFEPIPIHYCAPAGYAILKCNDETFNGTGPCSNVSTVQCTHGIRPVVSTQLLLNGSLAEKEIVIRSENLTNNAKIIIVHLHTPVEIVCTRPNNNTRKSVRIGPGQTFYATGDIIGDIKQAHCNISEEKWNDTLQKVGIELQKHFPNKTIKYNQSAGGDMEITTHSFNCGGEFFYCNTSNLFNGTYNGTYISTNSSANSTSTIALQCRIKQIINMWQGVGRCMYAPPIAGNITCRSNITGLLLTRDGGTNSNETETFRPAGGDMRDNWRSELYKYKVVKIEPLGVAPTRCKRRVVGRRRRRRAVGIGAVFLGFLGAAGSTMGAASMTLTVQARNLLSGIVQQQSNLLRAPEAQQHLLKLTVWGIKQLQARVLAVERYLRDQQLLGIWGCSGKLICCTNVPWNSSWSNRNLSEIWDNMTWLQWDKEISNYTQIIYGLLEESQNQQEKNEQDLLALD

SEQ ID NO: 161 - DNA, 1981 bp, synthetic construct
  source 1..1981: mol_type = other DNA
gtcgacaagcttcccgggccaccatgggctccctgcagcccctggccaccctgtacctgctgggcatgctggtggcctccgtgctggccgccgagaacctgtgggtgaccgtgtactacggcgtgcccgtgtggaaggaggccaagaccaccctgttctgcgcctccgacgcccgcgcctacgagaaggaggtgcacaacgtgtgggccacccacgcctgcgtgcccaccgacccctccccccaggagctggtgctgggcaacgtgaccgagaacttcaacatgtggaagaacgacatggtggaccagatgcacgaggacatcatctccctgtgggaccagtccctgaagccctgcgtgaagctgacccccctgtgcgtgaccctgatctgctccaacgccaccgtgaagaacggcaccgtggaggagatgaagaactgctccttcaacaccaccaccgagatccgcgacaaggagaagaaggagtacgccctgttctacaagcccgacatcgtgcccctgtccgagaccaacaacacctccgagtaccgcctgatcaactgcaacacctccgcctgcacccaggcctgccccaaggtgaccttcgagcccatccccatccactactgcgcccccgccggctacgccatcctgaagtgcaacgacgagaccttcaacggcaccggcccctgctccaacgtgtccaccgtgcagtgcacccacggcatccgccccgtggtgtccacccagctgctgctgaacggctccctggccgagaaggagatcgtgatccgctccgagaacctgaccaacaacgccaagatcatcatcgtgcacctgcacacccccgtggagatcgtgtgcacccgccccaacaacaacacccgcaagtccgtgcgcatcggccccggccagaccttctacgccaccggcgacaacatcggcgacatcaagcaggcccactgcaacatctccgaggagaagtggaacgacaccctgcagaaggtgggcatcgagctgcagaagcacttccccaacaagaccatcaagtacaaccagtccgccggcggcgacatggagatcaccacccactccttcaactgcggcggcgagttcttctactgcaacacctccaacctgttcaacggcacctacaacggcacctacatctccaccaactcctccgccaactccacctccaccatcaccctgcagtgccgcatcaagcagatcatcaacatgtggcagggcgtgggccgctgcatgtacgccccccccatcgccggcaacatcacctgccgctccaacatcaccggcctgctgctgacccgcgacggcggcaccaactccaacgagaccgagaccttccgccccgccggcggcgacatgcgcgacaactggcgctccgagctgtacaagtacaaggtggtgaagatcgagcccctgggcgtggcccccacccgctgcaagcgccgcgtggtgggccgccgccgccgccgccgcgccgtgggcatcggcgccgtgttcctgggcttcctgggcgccgccggctccaccatgggcgccgcctccatgaccctgaccgtgcaggcccgcaacctgctgtccggcatcgtgcagcagcagtccaacctgctgcgcgcccccgaggcccagcagcacctgctgaagctgaccgtgtggggcatcaagcagctgcaggcccgcgtgctggccgtggagcgctacctgcgcgaccagcagctgctgggcatctggggctgctccggcaagctgatctgctgcaccaacgtgccctggaactcctcctggtccaaccgcaacctgtccgagatctgggacaacatgacctggctgcagtgggacaaggagatctccaactacacccagatcatctacggcctgctggaggagtcccagaaccagcaggagaagaacgagcaggacctgctggccctggactgataagcggccgcggatcc

SEQ ID NO: 162 - protein, 646 aa, synthetic construct
MGSLQPLATLYLLGMLVASVLAAENLWVTVYYGVPVWKEAKTTLFCASDARAYEKEVHNVWATHACVPTDPSPQELVLGNVTENFNMWKNDMVDQMHEDIISLWDQSLKPCVKLTPLCVTLICSNATVKNGTVEEMKNCSFNTTTEIRDKEKKEYALFYKPDIVPLSETNNTSEYRLINCNTSACTQACPKVTFEPIPIHYCAPAGYAILKCNDETFNGTGPCSNVSTVQCTHGIRPVVSTQLLLNGSLAEKEIVIRSENLTNNAKIIIVHLHTPVEIVCTRPNNNTRKSVRIGPGQTFYATGDNIGDIKQAHCNISEEKWNDTLQKVGIELQKHFPNKTIKYNQSAGGDMEITTHSFNCGGEFFYCNTSNLFNGTYNGTYISTNSSANSTSTITLQCRIKQIINMWQGVGRCMYAPPIAGNITCRSNITGLLLTRDGGTNSNETETFRPAGGDMRDNWRSELYKYKVVKIEPLGVAPTRCKRRVVGRRRRRRAVGIGAVFLGFLGAAGSTMGAASMTLTVQARNLLSGIVQQQSNLLRAPEAQQHLLKLTVWGIKQLQARVLAVERYLRDQQLLGIWGCSGKLICCTNVPWNSSWSNRNLSEIWDNMTWLQWDKEISNYTQIIYGLLEESQNQQEKNEQDLLALD

SEQ ID NO: 163 - DNA, 1981 bp, synthetic construct
  source 1..1981: mol_type = other DNA
gtcgacaagcttcccgggccaccatgggctccctgcagcccctggccaccctgtacctgctgggcatgctggtggcctccgtgctggccgccgagaacctgtgggtgaccgtgtactacggcgtgcccgtgtggaaggaggccaagaccaccctgttctgcgcctccgacgcccgcgcctacgagaaggaggtgcacaacgtgtgggccacccacgcctgcgtgcccaccgacccctccccccaggagctggtgctgggcaacgtgaccgagaacttcaacatgtggaagaacgacatggtggaccagatgcacgaggacatcatctccctgtgggaccagtccctgaagccctgcgtgaagctgacccccctgtgcgtgaccctgatctgctccaacgccaccgtgaagaacggcaccgtggaggagatgaagaactgctccttcaacaccaccaccgagatccgcgacaaggagaagaaggagtacgccctgttctacaagcccgacatcgtgcccctgtccgagaccaacaacacctccgagtaccgcctgatcaactgcaacacctccgcctgcacccaggcctgccccaaggtgaccttcgagcccatccccatccactactgcgcccccgccggctacgccatcctgaagtgcaacgacgagaccttcaacggcaccggcccctgctccaacgtgtccaccgtgcagtgcacccacggcatccgccccgtggtgtccacccagctgctgctgaacggctccctggccgagaaggagatcgtgatccgctccgagaacctgaccaacaacgccaagatcatcatcgtgcacctgcacaagcccgtgacgatcgtgtgcacccgccccaacaacaacacccgcaagtccgtgcgcatcggccccggccagaccttctacgccaccggcgacaacatcggcgacatcaagcaggcccactgcaacatctccgaggagaagtggaacgacaccctgcagaaggtgggcatcgagctgcagaagcacttccccaacaagaccatcaagtacaaccagtccgccggcggcgacatggagatcaccacccactccttcaactgcggcggcgagttcttctactgcaacacctccaacctgttcaacggcacctacaacggcacctacatctccaccaactcctccgccaagtccacctccaccatcaccctgcagtgccgcatcaagcagatcatcaacatgtggcagggcgtgggccgctgcatgtacgccccccccatcgccggcgccatcacctgccgctccaacatcaccggcctgctgctgacccgcgacggcggcaccaactccaacgagaccgagaccttccgccccgccggcggcgacatgcgcgacaactggcgctccgagctgtacaagtacaaggtggtgaagatcgagcccctgggcgtggcccccacccgctgcaagcgccgcgtggtgggccgccgccgccgccgccgcgccgtgggcatcggcgccgtgttcctgggcttcctgggcgccgccggctccaccatgggcgccgcctccatgaccctgaccgtgcaggcccgcaacctgctgtccggcatcgtgcagcagcagtccaacctgctgcgcgcccccgaggcccagcagcacctgctgaagctgaccgtgtggggcatcaagcagctgcaggcccgcgtgctggccgtggagcgctacctgcgcgaccagcagctgctgggcatctggggctgctccggcaagctgatctgctgcaccaacgtgccctggaactcctcctggtccaaccgcaacctgtccgagatctgggacaacatgacctggctgcagtgggacaaggagatctccaactacacccagatcatctacggcctgctggaggagtcccagaaccagcaggagaagaacgagcaggacctgctggccctggactgataagcggccgcggatcc

SEQ ID NO: 164 - protein, 646 aa, synthetic construct
MGSLQPLATLYLLGMLVASVLAAENLWVTVYYGVPVWKEAKTTLFCASDARAYEKEVHNVWATHACVPTDPSPQELVLGNVTENFNMWKNDMVDQMHEDIISLWDQSLKPCVKLTPLCVTLICSNATVKNGTVEEMKNCSFNTTTEIRDKEKKEYALFYKPDIVPLSETNNTSEYRLINCNTSACTQACPKVTFEPIPIHYCAPAGYAILKCNDETFNGTGPCSNVSTVQCTHGIRPVVSTQLLLNGSLAEKEIVIRSENLTNNAKIIIVHLHKPVTIVCTRPNNNTRKSVRIGPGQTFYATGDNIGDIKQAHCNISEEKWNDTLQKVGIELQKHFPNKTIKYNQSAGGDMEITTHSFNCGGEFFYCNTSNLFNGTYNGTYISTNSSAKSTSTITLQCRIKQIINMWQGVGRCMYAPPIAGAITCRSNITGLLLTRDGGTNSNETETFRPAGGDMRDNWRSELYKYKVVKIEPLGVAPTRCKRRVVGRRRRRRAVGIGAVFLGFLGAAGSTMGAASMTLTVQARNLLSGIVQQQSNLLRAPEAQQHLLKLTVWGIKQLQARVLAVERYLRDQQLLGIWGCSGKLICCTNVPWNSSWSNRNLSEIWDNMTWLQWDKEISNYTQIIYGLLEESQNQQEKNEQDLLALD

SEQ ID NO: 165 - DNA, 1981 bp, synthetic construct
  source 1..1981: mol_type = other DNA
gtcgacaagcttcccgggccaccatgggctccctgcagcccctggccaccctgtacctgctgggcatgctggtggcctccgtgctggccgccgagaacctgtgggtgaccgtgtactacggcgtgcccgtgtggaaggaggccaagaccaccctgttctgcgcctccgacgcccgcgcctacgagaaggaggtgcacaacgtgtgggccacccacgcctgcgtgcccaccgacccctccccccaggagctggtgctgggcaacgtgaccgagaacttcaacatgtggaagaacgacatggtggaccagatgcacgaggacatcatctccctgtgggaccagtccctgaagccctgcgtgaagctgacccccctgtgcgtgaccctgatctgctccgacgccaccgtgaagaccggcaccgtggaggagatgaagaactgctccttcaacaccaccaccgagatccgcgacaaggagaagaaggagtacgccctgttctacaagcccgacatcgtgcccctgtccgagaccaacaacacctccgagtaccgcctgatcaactgcaacacctccgcctgcacccaggcctgccccaaggtgaccttcgagcccatccccatccactactgcgcccccgccggctacgccatcctgaagtgcaacgacgagaccttcaacggcaccggcccctgctccaacgtgtccaccgtgcagtgcacccacggcatccgccccgtggtgtccacccagctgctgctgaacggctccctggccgagaaggagatcgtgatccgctccgagaacctgaccaacaacgccaagatcatcatcgtgcacctgcacacccccgtggagatcgtgtgcacccgccccaacaacaacacccgcaagtccgtgcgcatcggccccggccagaccttctacgccaccggcgacaacatcggcgacatcaagcaggcccactgcaacatctccgaggagaagtggaacgacaccctgcagaaggtgggcatcgagctgcagaagcacttccccaacaagaccatcaagtacaaccagtccgccggcggcgacatggagatcaccacccactccttcaactgcggcggcgagttcttctactgcaacacctccaacctgttcaacggcacctacaacggcacctacatctccaccaactcctccgccaactccacctccaccatcaccctgcagtgccgcatcaagcagatcatcaacatgtggcagggcgtgggccgctgcatgtacgccccccccatcgccggcaacatcacctgccgctccaacatcaccggcctgctgctgacccgcgacggcggcaccaactccaacgagaccgagaccttccgccccgccggcggcgacatgcgcgacaactggcgctccgagctgtacaagtacaaggtggtgaagatcgagcccctgggcgtggcccccacccgctgcaagcgccgcgtggtgggccgccgccgccgccgccgcgccgtgggcatcggcgccgtgttcctgggcttcctgggcgccgccggctccaccatgggcgccgcctccatgaccctgaccgtgcaggcccgcaacctgctgtccggcatcgtgcagcagcagtccaacctgctgcgcgcccccgaggcccagcagcacctgctgaagctgaccgtgtggggcatcaagcagctgcaggcccgcgtgctggccgtggagcgctacctgcgcgaccagcagctgctgggcatctggggctgctccggcaagctgatctgctgcaccaacgtgccctggaactcctcctggtccaaccgcaacctgtccgagatctgggacaacatgacctggctgcagtgggacaaggagatctccaactacacccagatcatctacggcctgctggaggagtcccagaaccagcaggagaagaacgagcaggacctgctggccctggactgataagcggccgcggatcc

SEQ ID NO: 166 - protein, 646 aa, synthetic construct
MGSLQPLATLYLLGMLVASVLAAENLWVTVYYGVPVWKEAKTTLFCASDARAYEKEVHNVWATHACVPTDPSPQELVLGNVTENFNMWKNDMVDQMHEDIISLWDQSLKPCVKLTPLCVTLICSDATVKTGTVEEMKNCSFNTTTEIRDKEKKEYALFYKPDIVPLSETNNTSEYRLINCNTSACTQACPKVTFEPIPIHYCAPAGYAILKCNDETFNGTGPCSNVSTVQCTHGIRPVVSTQLLLNGSLAEKEIVIRSENLTNNAKIIIVHLHTPVEIVCTRPNNNTRKSVRIGPGQTFYATGDNIGDIKQAHCNISEEKWNDTLQKVGIELQKHFPNKTIKYNQSAGGDMEITTHSFNCGGEFFYCNTSNLFNGTYNGTYISTNSSANSTSTITLQCRIKQIINMWQGVGRCMYAPPIAGNITCRSNITGLLLTRDGGTNSNETETFRPAGGDMRDNWRSELYKYKVVKIEPLGVAPTRCKRRVVGRRRRRRAVGIGAVFLGFLGAAGSTMGAASMTLTVQARNLLSGIVQQQSNLLRAPEAQQHLLKLTVWGIKQLQARVLAVERYLRDQQLLGIWGCSGKLICCTNVPWNSSWSNRNLSEIWDNMTWLQWDKEISNYTQIIYGLLEESQNQQEKNEQDLLALD

SEQ ID NO: 167 - DNA, 1981 bp, synthetic construct
  source 1..1981: mol_type = other DNA
gtcgacaagcttcccgggccaccatgggctccctgcagcccctggccaccctgtacctgctgggcatgctggtggcctccgtgctggccgccgagaacctgtgggtgaccgtgtactacggcgtgcccgtgtggaaggaggccaagaccaccctgttctgcgcctccgacgcccgcgcctacgagaaggaggtgcacaacgtgtgggccacccacgcctgcgtgcccaccgacccctccccccaggagctggtgctgggcaacgtgaccgagaacttcaacatgtggaagaacgacatggtggaccagatgcacgaggacatcatctccctgtgggaccagtccctgaagccctgcgtgaagctgacccccctgtgcgtgaccctgatctgctccaacgccaccgtgaagaacggcaccgtggaggagatgaagaactgctccttcaacaccaccaccgagatccgcgacaaggagaagaaggagtacgccctgttctacaagcccgacatcgtgcccctgtccgagaccaacaacacctccgagtaccgcctgatcaactgcaacacctccgcctgcacccaggcctgccccaaggtgaccttcgagcccatccccatccactactgcgcccccgccggctacgccatcctgaagtgcaacgacgagaccttcaacggcaccggcccctgctccaacgtgtccaccgtgcagtgcacccacggcatccgccccgtggtgtccacccagctgctgctgaacggctccctggccgagaaggagatcgtgatccgctccgagaacctgaccaacaacgccaagatcatcatcgtgcacctgcacacccccgtggagatcgtgtgcacccgccccaacaacaacaaccgcaagtccgtgcgcatcggccccggccagaccttctacgccaccggcgacaacatcggcgacatcaagcaggcccactgcaacatctccgaggagaagtggaacgacaccctgcagaaggtgggcatcgagctgcagaagcacttccccaacaagaccatcaagtacaaccagtccgccggcggcgacatggagatcaccacccactccttcaactgcggcggcgagttcttctactgcaacacctccaacctgttcaacggcacctacaacggcacctacatctccaccaactcctccgccaactccacctccaccatcaccctgcagtgccgcatcaagcagatcatcaacatgtggcagggcgtgggccgctgcatgtacgccccccccatcgccggcaacatcacctgccgctccaacatcaccggcctgctgctgacccgcgacggcggcaccaactccaacgagaccgagaccttccgccccgccggcggcgacatgcgcgacaactggcgctccgagctgtacaagtacaaggtggtgaagatcgagcccctgggcgtggcccccacccgctgcaagcgccgcgtggtgggccgccgccgccgccgccgcgccgtgggcatcggcgccgtgttcctgggcttcctgggcgccgccggctccaccatgggcgccgcctccatgaccctgaccgtgcaggcccgcaacctgctgtccggcatcgtgcagcagcagtccaacctgctgcgcgcccccgaggcccagcagcacctgctgaagctgaccgtgtggggcatcaagcagctgcaggcccgcgtgctggccgtggagcgctacctgcgcgaccagcagctgctgggcatctggggctgctccggcaagctgatctgctgcaccaacgtgccctggaactcctcctggtccaaccgcaacctgtccgagatctgggacaacatgacctggctgcagtgggacaaggagatctccaactacacccagatcatctacggcctgctggaggagtcccagaaccagcaggagaagaacgagcaggacctgctggccctggactgataagcggccgcggatcc

SEQ ID NO: 168 - protein, 646 aa, synthetic construct
MGSLQPLATLYLLGMLVASVLAAENLWVTVYYGVPVWKEAKTTLFCASDARAYEKEVHNVWATHACVPTDPSPQELVLGNVTENFNMWKNDMVDQMHEDIISLWDQSLKPCVKLTPLCVTLICSNATVKNGTVEEMKNCSFNTTTEIRDKEKKEYALFYKPDIVPLSETNNTSEYRLINCNTSACTQACPKVTFEPIPIHYCAPAGYAILKCNDETFNGTGPCSNVSTVQCTHGIRPVVSTQLLLNGSLAEKEIVIRSENLTNNAKIIIVHLHTPVEIVCTRPNNNNRKSVRIGPGQTFYATGDNIGDIKQAHCNISEEKWNDTLQKVGIELQKHFPNKTIKYNQSAGGDMEITTHSFNCGGEFFYCNTSNLFNGTYNGTYISTNSSANSTSTITLQCRIKQIINMWQGVGRCMYAPPIAGNITCRSNITGLLLTRDGGTNSNETETFRPAGGDMRDNWRSELYKYKVVKIEPLGVAPTRCKRRVVGRRRRRRAVGIGAVFLGFLGAAGSTMGAASMTLTVQARNLLSGIVQQQSNLLRAPEAQQHLLKLTVWGIKQLQARVLAVERYLRDQQLLGIWGCSGKLICCTNVPWNSSWSNRNLSEIWDNMTWLQWDKEISNYTQIIYGLLEESQNQQEKNEQDLLALD

SEQ ID NO: 169 - DNA, 1981 bp, synthetic construct
  source 1..1981: mol_type = other DNA
gtcgacaagcttcccgggccaccatgggctccctgcagcccctggccaccctgtacctgctgggcatgctggtggcctccgtgctggccgccgagaacctgtgggtgaccgtgtactacggcgtgcccgtgtggaaggaggccaagaccaccctgttctgcgcctccgacgcccgcgcctacgagaaggaggtgcacaacgtgtgggccacccacgcctgcgtgcccaccgacccctccccccaggagctggtgctgggcaacgtgaccgagaacttcaacatgtggaagaacgacatggtggaccagatgcacgaggacatcatctccctgtgggaccagtccctgaagccctgcgtgaagctgacccccctgtgcgtgaccctgatctgctccaacgccaccgtgaagaacggcaccgtggaggagatgaagaactgctccttcaacaccaccaccgagatccgcgacaaggagaagaaggagtacgccctgttctacaagcccgacatcgtgcccctgtccgagaccaacaacacctccgagtaccgcctgatcaactgcaacacctccgcctgcacccaggcctgccccaaggtgaccttcgagcccatccccatccactactgcgcccccgccggctacgccatcctgaagtgcaacgacgagaccttcaacggcaccggcccctgctccaacgtgtccaccgtgcagtgcacccacggcatccgccccgtggtgtccacccagctgctgctgaacggctccctggccgagaaggagatcgtgatccgctccgagaacctgaccaacaacgccaagatcatcatcgtgcacctgcacaagcccgtgacgatcgtgtgcacccgccccaacaacaacaaccgcaagtccgtgcgcatcggccccggccagaccttctacgccaccggcgacaacatcggcgacatcaagcaggcccactgcaacatctccgaggagaagtggaacgacaccctgcagaaggtgggcatcgagctgcagaagcacttccccaacaagaccatcaagtacaaccagtccgccggcggcgacatggagatcaccacccactccttcaactgcggcggcgagttcttctactgcaacacctccaacctgttcaacggcacctacaacggcacctacatctccaccaactcctccgccaagtccacctccaccatcaccctgcagtgccgcatcaagcagatcatcaacatgtggcagggcgtgggccgctgcatgtacgccccccccatcgccggcgccatcacctgccgctccaacatcaccggcctgctgctgacccgcgacggcggcaccaactccaacgagaccgagaccttccgccccgccggcggcgacatgcgcgacaactggcgctccgagctgtacaagtacaaggtggtgaagatcgagcccctgggcgtggcccccacccgctgcaagcgccgcgtggtgggccgccgccgccgccgccgcgccgtgggcatcggcgccgtgttcctgggcttcctgggcgccgccggctccaccatgggcgccgcctccatgaccctgaccgtgcaggcccgcaacctgctgtccggcatcgtgcagcagcagtccaacctgctgcgcgcccccgaggcccagcagcacctgctgaagctgaccgtgtggggcatcaagcagctgcaggcccgcgtgctggccgtggagcgctacctgcgcgaccagcagctgctgggcatctggggctgctccggcaagctgatctgctgcaccaacgtgccctggaactcctcctggtccaaccgcaacctgtccgagatctgggacaacatgacctggctgcagtgggacaaggagatctccaactacacccagatcatctacggcctgctggaggagtcccagaaccagcaggagaagaacgagcaggacctgctggccctggactgataagcggccgcggatcc

SEQ ID NO: 170 - protein, 646 aa, synthetic construct
MGSLQPLATLYLLGMLVASVLAAENLWVTVYYGVPVWKEAKTTLFCASDARAYEKEVHNVWATHACVPTDPSPQELVLGNVTENFNMWKNDMVDQMHEDIISLWDQSLKPCVKLTPLCVTLICSNATVKNGTVEEMKNCSFNTTTEIRDKEKKEYALFYKPDIVPLSETNNTSEYRLINCNTSACTQACPKVTFEPIPIHYCAPAGYAILKCNDETFNGTGPCSNVSTVQCTHGIRPVVSTQLLLNGSLAEKEIVIRSENLTNNAKIIIVHLHKPVTIVCTRPNNNNRKSVRIGPGQTFYATGDNIGDIKQAHCNISEEKWNDTLQKVGIELQKHFPNKTIKYNQSAGGDMEITTHSFNCGGEFFYCNTSNLFNGTYNGTYISTNSSAKSTSTITLQCRIKQIINMWQGVGRCMYAPPIAGAITCRSNITGLLLTRDGGTNSNETETFRPAGGDMRDNWRSELYKYKVVKIEPLGVAPTRCKRRVVGRRRRRRAVGIGAVFLGFLGAAGSTMGAASMTLTVQARNLLSGIVQQQSNLLRAPEAQQHLLKLTVWGIKQLQARVLAVERYLRDQQLLGIWGCSGKLICCTNVPWNSSWSNRNLSEIWDNMTWLQWDKEISNYTQIIYGLLEESQNQQEKNEQDLLALD

SEQ ID NO: 171 - DNA, 1981 bp, synthetic construct
  source 1..1981: mol_type = other DNA
gtcgacaagcttcccgggccaccatgggctccctgcagcccctggccaccctgtacctgctgggcatgctggtggcctccgtgctggccgccgagaacctgtgggtgaccgtgtactacggcgtgcccgtgtggaaggaggccaagaccaccctgttctgcgcctccgacgcccgcgcctacgagaaggaggtgcacaacgtgtgggccacccacgcctgcgtgcccaccgacccctccccccaggagctggtgctgggcaacgtgaccgagaacttcaacatgtggaagaacgacatggtggaccagatgcacgaggacatcatctccctgtgggaccagtccctgaagccctgcgtgaagctgacccccctgtgcgtgaccctgatctgctccgacgccaccgtgaagaccggcaccgtggaggagatgaagaactgctccttcaacaccaccaccgagatccgcgacaaggagaagaaggagtacgccctgttctacaagcccgacatcgtgcccctgtccgagaccaacaacacctccgagtaccgcctgatcaactgcaacacctccgcctgcacccaggcctgccccaaggtgaccttcgagcccatccccatccactactgcgcccccgccggctacgccatcctgaagtgcaacgacgagaccttcaacggcaccggcccctgctccaacgtgtccaccgtgcagtgcacccacggcatccgccccgtggtgtccacccagctgctgctgaacggctccctggccgagaaggagatcgtgatccgctccgagaacctgaccaacaacgccaagatcatcatcgtgcacctgcacacccccgtggagatcgtgtgcacccgccccaacaacaacaaccgcaagtccgtgcgcatcggccccggccagaccttctacgccaccggcgacaacatcggcgacatcaagcaggcccactgcaacatctccgaggagaagtggaacgacaccctgcagaaggtgggcatcgagctgcagaagcacttccccaacaagaccatcaagtacaaccagtccgccggcggcgacatggagatcaccacccactccttcaactgcggcggcgagttcttctactgcaacacctccaacctgttcaacggcacctacaacggcacctacatctccaccaactcctccgccaactccacctccaccatcaccctgcagtgccgcatcaagcagatcatcaacatgtggcagggcgtgggccgctgcatgtacgccccccccatcgccggcaacatcacctgccgctccaacatcaccggcctgctgctgacccgcgacggcggcaccaactccaacgagaccgagaccttccgccccgccggcggcgacatgcgcgacaactggcgctccgagctgtacaagtacaaggtggtgaagatcgagcccctgggcgtggcccccacccgctgcaagcgccgcgtggtgggccgccgccgccgccgccgcgccgtgggcatcggcgccgtgttcctgggcttcctgggcgccgccggctccaccatgggcgccgcctccatgaccctgaccgtgcaggcccgcaacctgctgtccggcatcgtgcagcagcagtccaacctgctgcgcgcccccgaggcccagcagcacctgctgaagctgaccgtgtggggcatcaagcagctgcaggcccgcgtgctggccgtggagcgctacctgcgcgaccagcagctgctgggcatctggggctgctccggcaagctgatctgctgcaccaacgtgccctggaactcctcctggtccaaccgcaacctgtccgagatctgggacaacatgacctggctgcagtgggacaaggagatctccaactacacccagatcatctacggcctgctggaggagtcccagaaccagcaggagaagaacgagcaggacctgctggccctggactgataagcggccgcggatcc

SEQ ID NO: 172 - protein, 646 aa, synthetic construct
MGSLQPLATLYLLGMLVASVLAAENLWVTVYYGVPVWKEAKTTLFCASDARAYEKEVHNVWATHACVPTDPSPQELVLGNVTENFNMWKNDMVDQMHEDIISLWDQSLKPCVKLTPLCVTLICSDATVKTGTVEEMKNCSFNTTTEIRDKEKKEYALFYKPDIVPLSETNNTSEYRLINCNTSACTQACPKVTFEPIPIHYCAPAGYAILKCNDETFNGTGPCSNVSTVQCTHGIRPVVSTQLLLNGSLAEKEIVIRSENLTNNAKIIIVHLHTPVEIVCTRPNNNNRKSVRIGPGQTFYATGDNIGDIKQAHCNISEEKWNDTLQKVGIELQKHFPNKTIKYNQSAGGDMEITTHSFNCGGEFFYCNTSNLFNGTYNGTYISTNSSANSTSTITLQCRIKQIINMWQGVGRCMYAPPIAGNITCRSNITGLLLTRDGGTNSNETETFRPAGGDMRDNWRSELYKYKVVKIEPLGVAPTRCKRRVVGRRRRRRAVGIGAVFLGFLGAAGSTMGAASMTLTVQARNLLSGIVQQQSNLLRAPEAQQHLLKLTVWGIKQLQARVLAVERYLRDQQLLGIWGCSGKLICCTNVPWNSSWSNRNLSEIWDNMTWLQWDKEISNYTQIIYGLLEESQNQQEKNEQDLLALD

SEQ ID NO: 173 - DNA, 1981 bp, synthetic construct
  source 1..1981: mol_type = other DNA
gtcgacaagcttcccgggccaccatgggctccctgcagcccctggccaccctgtacctgctgggcatgctggtggcctccgtgctggccgccgagaacctgtgggtgaccgtgtactacggcgtgcccgtgtggaaggaggccaagaccaccctgttctgcgcctccgacgcccgcgcctacgagaaggaggtgcacaacgtgtgggccacccacgcctgcgtgcccaccgacccctccccccaggagctggtgctgggcaacgtgaccgagaacttcaacatgtggaagaacgacatggtggaccagatgcacgaggacatcatctccctgtgggaccagtccctgaagccctgcgtgaagctgacccccctgtgcgtgaccctgatctgctccaacgccaccgtgaagaacggcaccgtggaggagatgaagaactgctccttcaacaccaccaccgagatccgcgacaaggagaagaaggagtacgccctgttctacaagcccgacatcgtgcccctgtccgagaccaacaacacctccgagtaccgcctgatcaactgcaacacctccgcctgcacccaggcctgccccaaggtgaccttcgagcccatccccatccactactgcgcccccgccggctacgccatcctgaagtgcaacgacgagaccttcaacggcaccggcccctgctccaacgtgtccaccgtgcagtgcacccacggcatccgccccgtggtgtccacccagctgctgctgaacggctccctggccgagaaggagatcgtgatccgctccgagaacctgaccaacaacgccaagatcatcatcgtgcacctgcacacccccgtggagatcgtgtgcacccgccccaacaacaacacccgcaagtccgtgcgcatcggccccggccagaccttctacgccaccggcgaccagatcggcgacatcaagcaggcccactgcaacatctccgaggagaagtggaacgacaccctgcagaaggtgggcatcgagctgcagaagcacttccccaacaagaccatcaagtacaaccagtccgccggcggcgacatggagatcaccacccactccttcaactgcggcggcgagttcttctactgcaacacctccaacctgttcaacggcacctacaacggcacctacatctccaccaactcctccgccaactccacctccaccatcaccctgcagtgccgcatcaagcagatcatcaacatgtggcagggcgtgggccgctgcatgtacgccccccccatcgccggcaacatcacctgccgctccaacatcaccggcctgctgctgacccgcgacggcggcaccaactccaacgagaccgagaccttccgccccgccggcggcgacatgcgcgacaactggcgctccgagctgtacaagtacaaggtggtgaagatcgagcccctgggcgtggcccccacccgctgcaagcgccgcgtggtgggccgccgccgccgccgccgcgccgtgggcatcggcgccgtgttcctgggcttcctgggcgccgccggctccaccatgggcgccgcctccatgaccctgaccgtgcaggcccgcaacctgctgtccggcatcgtgcagcagcagtccaacctgctgcgcgcccccgaggcccagcagcacctgctgaagctgaccgtgtggggcatcaagcagctgcaggcccgcgtgctggccgtggagcgctacctgcgcgaccagcagctgctgggcatctggggctgctccggcaagctgatctgctgcaccaacgtgccctggaactcctcctggtccaaccgcaacctgtccgagatctgggacaacatgacctggctgcagtgggacaaggagatctccaactacacccagatcatctacggcctgctggaggagtcccagaaccagcaggagaagaacgagcaggacctgctggccctggactgataagcggccgcggatcc

SEQ ID NO: 174 - protein, 646 aa, synthetic construct
MGSLQPLATLYLLGMLVASVLAAENLWVTVYYGVPVWKEAKTTLFCASDARAYEKEVHNVWATHACVPTDPSPQELVLGNVTENFNMWKNDMVDQMHEDIISLWDQSLKPCVKLTPLCVTLICSNATVKNGTVEEMKNCSFNTTTEIRDKEKKEYALFYKPDIVPLSETNNTSEYRLINCNTSACTQACPKVTFEPIPIHYCAPAGYAILKCNDETFNGTGPCSNVSTVQCTHGIRPVVSTQLLLNGSLAEKEIVIRSENLTNNAKIIIVHLHTPVEIVCTRPNNNTRKSVRIGPGQTFYATGDQIGDIKQAHCNISEEKWNDTLQKVGIELQKHFPNKTIKYNQSAGGDMEITTHSFNCGGEFFYCNTSNLFNGTYNGTYISTNSSANSTSTITLQCRIKQIINMWQGVGRCMYAPPIAGNITCRSNITGLLLTRDGGTNSNETETFRPAGGDMRDNWRSELYKYKVVKIEPLGVAPTRCKRRVVGRRRRRRAVGIGAVFLGFLGAAGSTMGAASMTLTVQARNLLSGIVQQQSNLLRAPEAQQHLLKLTVWGIKQLQARVLAVERYLRDQQLLGIWGCSGKLICCTNVPWNSSWSNRNLSEIWDNMTWLQWDKEISNYTQIIYGLLEESQNQQEKNEQDLLALD

SEQ ID NO: 175 - DNA, 1981 bp, synthetic construct
  source 1..1981: mol_type = other DNA
gtcgacaagcttcccgggccaccatgggctccctgcagcccctggccaccctgtacctgctgggcatgctggtggcctccgtgctggccgccgagaacctgtgggtgaccgtgtactacggcgtgcccgtgtggaaggaggccaagaccaccctgttctgcgcctccgacgcccgcgcctacgagaaggaggtgcacaacgtgtgggccacccacgcctgcgtgcccaccgacccctccccccaggagctggtgctgggcaacgtgaccgagaacttcaacatgtggaagaacgacatggtggaccagatgcacgaggacatcatctccctgtgggaccagtccctgaagccctgcgtgaagctgacccccctgtgcgtgaccctgatctgctccaacgccaccgtgaagaacggcaccgtggaggagatgaagaactgctccttcaacaccaccaccgagatccgcgacaaggagaagaaggagtacgccctgttctacaagcccgacatcgtgcccctgtccgagaccaacaacacctccgagtaccgcctgatcaactgcaacacctccgcctgcacccaggcctgccccaaggtgaccttcgagcccatccccatccactactgcgcccccgccggctacgccatcctgaagtgcaacgacgagaccttcaacggcaccggcccctgctccaacgtgtccaccgtgcagtgcacccacggcatccgccccgtggtgtccacccagctgctgctgaacggctccctggccgagaaggagatcgtgatccgctccgagaacctgaccaacaacgccaagatcatcatcgtgcacctgcacaagcccgtgacgatcgtgtgcacccgccccaacaacaacacccgcaagtccgtgcgcatcggccccggccagaccttctacgccaccggcgaccagatcggcgacatcaagcaggcccactgcaacatctccgaggagaagtggaacgacaccctgcagaaggtgggcatcgagctgcagaagcacttccccaacaagaccatcaagtacaaccagtccgccggcggcgacatggagatcaccacccactccttcaactgcggcggcgagttcttctactgcaacacctccaacctgttcaacggcacctacaacggcacctacatctccaccaactcctccgccaagtccacctccaccatcaccctgcagtgccgcatcaagcagatcatcaacatgtggcagggcgtgggccgctgcatgtacgccccccccatcgccggcgccatcacctgccgctccaacatcaccggcctgctgctgacccgcgacggcggcaccaactccaacgagaccgagaccttccgccccgccggcggcgacatgcgcgacaactggcgctccgagctgtacaagtacaaggtggtgaagatcgagcccctgggcgtggcccccacccgctgcaagcgccgcgtggtgggccgccgccgccgccgccgcgccgtgggcatcggcgccgtgttcctgggcttcctgggcgccgccggctccaccatgggcgccgcctccatgaccctgaccgtgcaggcccgcaacctgctgtccggcatcgtgcagcagcagtccaacctgctgcgcgcccccgaggcccagcagcacctgctgaagctgaccgtgtggggcatcaagcagctgcaggcccgcgtgctggccgtggagcgctacctgcgcgaccagcagctgctgggcatctggggctgctccggcaagctgatctgctgcaccaacgtgccctggaactcctcctggtccaaccgcaacctgtccgagatctgggacaacatgacctggctgcagtgggacaaggagatctccaactacacccagatcatctacggcctgctggaggagtcccagaaccagcaggagaagaacgagcaggacctgctggccctggactgataagcggccgcggatcc

SEQ ID NO: 176 - protein, 646 aa, synthetic construct
MGSLQPLATLYLLGMLVASVLAAENLWVTVYYGVPVWKEAKTTLFCASDARAYEKEVHNVWATHACVPTDPSPQELVLGNVTENFNMWKNDMVDQMHEDIISLWDQSLKPCVKLTPLCVTLICSNATVKNGTVEEMKNCSFNTTTEIRDKEKKEYALFYKPDIVPLSETNNTSEYRLINCNTSACTQACPKVTFEPIPIHYCAPAGYAILKCNDETFNGTGPCSNVSTVQCTHGIRPVVSTQLLLNGSLAEKEIVIRSENLTNNAKIIIVHLHKPVTIVCTRPNNNTRKSVRIGPGQTFYATGDQIGDIKQAHCNISEEKWNDTLQKVGIELQKHFPNKTIKYNQSAGGDMEITTHSFNCGGEFFYCNTSNLFNGTYNGTYISTNSSAKSTSTITLQCRIKQIINMWQGVGRCMYAPPIAGAITCRSNITGLLLTRDGGTNSNETETFRPAGGDMRDNWRSELYKYKVVKIEPLGVAPTRCKRRVVGRRRRRRAVGIGAVFLGFLGAAGSTMGAASMTLTVQARNLLSGIVQQQSNLLRAPEAQQHLLKLTVWGIKQLQARVLAVERYLRDQQLLGIWGCSGKLICCTNVPWNSSWSNRNLSEIWDNMTWLQWDKEISNYTQIIYGLLEESQNQQEKNEQDLLALD

SEQ ID NO: 177 - DNA, 1981 bp, synthetic construct
  source 1..1981: mol_type = other DNA
gtcgacaagcttcccgggccaccatgggctccctgcagcccctggccaccctgtacctgctgggcatgctggtggcctccgtgctggccgccgagaacctgtgggtgaccgtgtactacggcgtgcccgtgtggaaggaggccaagaccaccctgttctgcgcctccgacgcccgcgcctacgagaaggaggtgcacaacgtgtgggccacccacgcctgcgtgcccaccgacccctccccccaggagctggtgctgggcaacgtgaccgagaacttcaacatgtggaagaacgacatggtggaccagatgcacgaggacatcatctccctgtgggaccagtccctgaagccctgcgtgaagctgacccccctgtgcgtgaccctgatctgctccgacgccaccgtgaagaccggcaccgtggaggagatgaagaactgctccttcaacaccaccaccgagatccgcgacaaggagaagaaggagtacgccctgttctacaagcccgacatcgtgcccctgtccgagaccaacaacacctccgagtaccgcctgatcaactgcaacacctccgcctgcacccaggcctgccccaaggtgaccttcgagcccatccccatccactactgcgcccccgccggctacgccatcctgaagtgcaacgacgagaccttcaacggcaccggcccctgctccaacgtgtccaccgtgcagtgcacccacggcatccgccccgtggtgtccacccagctgctgctgaacggctccctggccgagaaggagatcgtgatccgctccgagaacctgaccaacaacgccaagatcatcatcgtgcacctgcacacccccgtggagatcgtgtgcacccgccccaacaacaacacccgcaagtccgtgcgcatcggccccggccagaccttctacgccaccggcgaccagatcggcgacatcaagcaggcccactgcaacatctccgaggagaagtggaacgacaccctgcagaaggtgggcatcgagctgcagaagcacttccccaacaagaccatcaagtacaaccagtccgccggcggcgacatggagatcaccacccactccttcaactgcggcggcgagttcttctactgcaacacctccaacctgttcaacggcacctacaacggcacctacatctccaccaactcctccgccaactccacctccaccatcaccctgcagtgccgcatcaagcagatcatcaacatgtggcagggcgtgggccgctgcatgtacgccccccccatcgccggcaacatcacctgccgctccaacatcaccggcctgctgctgacccgcgacggcggcaccaactccaacgagaccgagaccttccgccccgccggcggcgacatgcgcgacaactggcgctccgagctgtacaagtacaaggtggtgaagatcgagcccctgggcgtggcccccacccgctgcaagcgccgcgtggtgggccgccgccgccgccgccgcgccgtgggcatcggcgccgtgttcctgggcttcctgggcgccgccggctccaccatgggcgccgcctccatgaccctgaccgtgcaggcccgcaacctgctgtccggcatcgtgcagcagcagtccaacctgctgcgcgcccccgaggcccagcagcacctgctgaagctgaccgtgtggggcatcaagcagctgcaggcccgcgtgctggccgtggagcgctacctgcgcgaccagcagctgctgggcatctggggctgctccggcaagctgatctgctgcaccaacgtgccctggaactcctcctggtccaaccgcaacctgtccgagatctgggacaacatgacctggctgcagtgggacaaggagatctccaactacacccagatcatctacggcctgctggaggagtcccagaaccagcaggagaagaacgagcaggacctgctggccctggactgataagcggccgcggatcc

SEQ ID NO: 178 - protein, 646 aa, synthetic construct
MGSLQPLATLYLLGMLVASVLAAENLWVTVYYGVPVWKEAKTTLFCASDARAYEKEVHNVWATHACVPTDPSPQELVLGNVTENFNMWKNDMVDQMHEDIISLWDQSLKPCVKLTPLCVTLICSDATVKTGTVEEMKNCSFNTTTEIRDKEKKEYALFYKPDIVPLSETNNTSEYRLINCNTSACTQACPKVTFEPIPIHYCAPAGYAILKCNDETFNGTGPCSNVSTVQCTHGIRPVVSTQLLLNGSLAEKEIVIRSENLTNNAKIIIVHLHTPVEIVCTRPNNNTRKSVRIGPGQTFYATGDQIGDIKQAHCNISEEKWNDTLQKVGIELQKHFPNKTIKYNQSAGGDMEITTHSFNCGGEFFYCNTSNLFNGTYNGTYISTNSSANSTSTITLQCRIKQIINMWQGVGRCMYAPPIAGNITCRSNITGLLLTRDGGTNSNETETFRPAGGDMRDNWRSELYKYKVVKIEPLGVAPTRCKRRVVGRRRRRRAVGIGAVFLGFLGAAGSTMGAASMTLTVQARNLLSGIVQQQSNLLRAPEAQQHLLKLTVWGIKQLQARVLAVERYLRDQQLLGIWGCSGKLICCTNVPWNSSWSNRNLSEIWDNMTWLQWDKEISNYTQIIYGLLEESQNQQEKNEQDLLALD

SEQ ID NO: 179 - DNA, 1981 bp, synthetic construct
  source 1..1981: mol_type = other DNA
gtcgacaagcttcccgggccaccatgggctccctgcagcccctggccaccctgtacctgctgggcatgctggtggcctccgtgctggccgccgagaacctgtgggtgaccgtgtactacggcgtgcccgtgtggaaggaggccaagaccaccctgttctgcgcctccgacgcccgcgcctacgagaaggaggtgcacaacgtgtgggccacccacgcctgcgtgcccaccgacccctccccccaggagctggtgctgggcaacgtgaccgagaacttcaacatgtggaagaacgacatggtggaccagatgcacgaggacatcatctccctgtgggaccagtccctgaagccctgcgtgaagctgacccccctgtgcgtgaccctgatctgctccaacgccaccgtgaagaacggcaccgtggaggagatgaagaactgctccttcaacaccaccaccgagatccgcgacaaggagaagaaggagtacgccctgttctacaagcccgacatcgtgcccctgtccgagaccaacaacacctccgagtaccgcctgatcaactgcaacacctccgcctgcacccaggcctgccccaaggtgaccttcgagcccatccccatccactactgcgcccccgccggctacgccatcctgaagtgcaacgacgagaccttcaacggcaccggcccctgctccaacgtgtccaccgtgcagtgcacccacggcatccgccccgtggtgtccacccagctgctgctgaacggctccctggccgagaaggagatcgtgatccgctccgagaacctgaccaacaacgccaagatcatcatcgtgcacctgcacacccccgtggagatcgtgtgcacccgccccaacaacaacacccgcaagtccgtgcgcatcggccccggccagaccttctacgccaccggcgacaggatcggcgacatcaagcaggcccactgcaacatctccgaggagaagtggaacgacaccctgcagaaggtgggcatcgagctgcagaagcacttccccaacaagaccatcaagtacaaccagtccgccggcggcgacatggagatcaccacccactccttcaactgcggcggcgagttcttctactgcaacacctccaacctgttcaacggcacctacaacggcacctacatctccaccaactcctccgccaactccacctccaccatcaccctgcagtgccgcatcaagcagatcatcaacatgtggcagggcgtgggccgctgcatgtacgccccccccatcgccggcaacatcacctgccgctccaacatcaccggcctgctgctgacccgcgacggcggcaccaactccaacgagaccgagaccttccgccccgccggcggcgacatgcgcgacaactggcgctccgagctgtacaagtacaaggtggtgaagatcgagcccctgggcgtggcccccacccgctgcaagcgccgcgtggtgggccgccgccgccgccgccgcgccgtgggcatcggcgccgtgttcctgggcttcctgggcgccgccggctccaccatgggcgccgcctccatgaccctgaccgtgcaggcccgcaacctgctgtccggcatcgtgcagcagcagtccaacctgctgcgcgcccccgaggcccagcagcacctgctgaagctgaccgtgtggggcatcaagcagctgcaggcccgcgtgctggccgtggagcgctacctgcgcgaccagcagctgctgggcatctggggctgctccggcaagctgatctgctgcaccaacgtgccctggaactcctcctggtccaaccgcaacctgtccgagatctgggacaacatgacctggctgcagtgggacaaggagatctccaactacacccagatcatctacggcctgctggaggagtcccagaaccagcaggagaagaacgagcaggacctgctggccctggactgataagcggccgcggatcc

SEQ ID NO: 180 - protein, 646 aa, synthetic construct
MGSLQPLATLYLLGMLVASVLAAENLWVTVYYGVPVWKEAKTTLFCASDARAYEKEVHNVWATHACVPTDPSPQELVLGNVTENFNMWKNDMVDQMHEDIISLWDQSLKPCVKLTPLCVTLICSNATVKNGTVEEMKNCSFNTTTEIRDKEKKEYALFYKPDIVPLSETNNTSEYRLINCNTSACTQACPKVTFEPIPIHYCAPAGYAILKCNDETFNGTGPCSNVSTVQCTHGIRPVVSTQLLLNGSLAEKEIVIRSENLTNNAKIIIVHLHTPVEIVCTRPNNNTRKSVRIGPGQTFYATGDRIGDIKQAHCNISEEKWNDTLQKVGIELQKHFPNKTIKYNQSAGGDMEITTHSFNCGGEFFYCNTSNLFNGTYNGTYISTNSSANSTSTITLQCRIKQIINMWQGVGRCMYAPPIAGNITCRSNITGLLLTRDGGTNSNETETFRPAGGDMRDNWRSELYKYKVVKIEPLGVAPTRCKRRVVGRRRRRRAVGIGAVFLGFLGAAGSTMGAASMTLTVQARNLLSGIVQQQSNLLRAPEAQQHLLKLTVWGIKQLQARVLAVERYLRDQQLLGIWGCSGKLICCTNVPWNSSWSNRNLSEIWDNMTWLQWDKEISNYTQIIYGLLEESQNQQEKNEQDLLALD

SEQ ID NO: 181 - DNA, 1981 bp, synthetic construct
  source 1..1981: mol_type = other DNA
gtcgacaagcttcccgggccaccatgggctccctgcagcccctggccaccctgtacctgctgggcatgctggtggcctccgtgctggccgccgagaacctgtgggtgaccgtgtactacggcgtgcccgtgtggaaggaggccaagaccaccctgttctgcgcctccgacgcccgcgcctacgagaaggaggtgcacaacgtgtgggccacccacgcctgcgtgcccaccgacccctccccccaggagctggtgctgggcaacgtgaccgagaacttcaacatgtggaagaacgacatggtggaccagatgcacgaggacatcatctccctgtgggaccagtccctgaagccctgcgtgaagctgacccccctgtgcgtgaccctgatctgctccaacgccaccgtgaagaacggcaccgtggaggagatgaagaactgctccttcaacaccaccaccgagatccgcgacaaggagaagaaggagtacgccctgttctacaagcccgacatcgtgcccctgtccgagaccaacaacacctccgagtaccgcctgatcaactgcaacacctccgcctgcacccaggcctgccccaaggtgaccttcgagcccatccccatccactactgcgcccccgccggctacgccatcctgaagtgcaacgacgagaccttcaacggcaccggcccctgctccaacgtgtccaccgtgcagtgcacccacggcatccgccccgtggtgtccacccagctgctgctgaacggctccctggccgagaaggagatcgtgatccgctccgagaacctgaccaacaacgccaagatcatcatcgtgcacctgcacaagcccgtgacgatcgtgtgcacccgccccaacaacaacacccgcaagtccgtgcgcatcggccccggccagaccttctacgccaccggcgacaggatcggcgacatcaagcaggcccactgcaacatctccgaggagaagtggaacgacaccctgcagaaggtgggcatcgagctgcagaagcacttccccaacaagaccatcaagtacaaccagtccgccggcggcgacatggagatcaccacccactccttcaactgcggcggcgagttcttctactgcaacacctccaacctgttcaacggcacctacaacggcacctacatctccaccaactcctccgccaagtccacctccaccatcaccctgcagtgccgcatcaagcagatcatcaacatgtggcagggcgtgggccgctgcatgtacgccccccccatcgccggcgccatcacctgccgctccaacatcaccggcctgctgctgacccgcgacggcggcaccaactccaacgagaccgagaccttccgccccgccggcggcgacatgcgcgacaactggcgctccgagctgtacaagtacaaggtggtgaagatcgagcccctgggcgtggcccccacccgctgcaagcgccgcgtggtgggccgccgccgccgccgccgcgccgtgggcatcggcgccgtgttcctgggcttcctgggcgccgccggctccaccatgggcgccgcctccatgaccctgaccgtgcaggcccgcaacctgctgtccggcatcgtgcagcagcagtccaacctgctgcgcgcccccgaggcccagcagcacctgctgaagctgaccgtgtggggcatcaagcagctgcaggcccgcgtgctggccgtggagcgctacctgcgcgaccagcagctgctgggcatctggggctgctccggcaagctgatctgctgcaccaacgtgccctggaactcctcctggtccaaccgcaacctgtccgagatctgggacaacatgacctggctgcagtgggacaaggagatctccaactacacccagatcatctacggcctgctggaggagtcccagaaccagcaggagaagaacgagcaggacctgctggccctggactgataagcggccgcggatcc

SEQ ID NO: 182 - protein, 646 aa, synthetic construct
MGSLQPLATLYLLGMLVASVLAAENLWVTVYYGVPVWKEAKTTLFCASDARAYEKEVHNVWATHACVPTDPSPQELVLGNVTENFNMWKNDMVDQMHEDIISLWDQSLKPCVKLTPLCVTLICSNATVKNGTVEEMKNCSFNTTTEIRDKEKKEYALFYKPDIVPLSETNNTSEYRLINCNTSACTQACPKVTFEPIPIHYCAPAGYAILKCNDETFNGTGPCSNVSTVQCTHGIRPVVSTQLLLNGSLAEKEIVIRSENLTNNAKIIIVHLHKPVTIVCTRPNNNTRKSVRIGPGQTFYATGDRIGDIKQAHCNISEEKWNDTLQKVGIELQKHFPNKTIKYNQSAGGDMEITTHSFNCGGEFFYCNTSNLFNGTYNGTYISTNSSAKSTSTITLQCRIKQIINMWQGVGRCMYAPPIAGAITCRSNITGLLLTRDGGTNSNETETFRPAGGDMRDNWRSELYKYKVVKIEPLGVAPTRCKRRVVGRRRRRRAVGIGAVFLGFLGAAGSTMGAASMTLTVQARNLLSGIVQQQSNLLRAPEAQQHLLKLTVWGIKQLQARVLAVERYLRDQQLLGIWGCSGKLICCTNVPWNSSWSNRNLSEIWDNMTWLQWDKEISNYTQIIYGLLEESQNQQEKNEQDLLALD

SEQ ID NO: 183 - DNA, 1981 bp, synthetic construct
  source 1..1981: mol_type = other DNA
gtcgacaagcttcccgggccaccatgggctccctgcagcccctggccaccctgtacctgctgggcatgctggtggcctccgtgctggccgccgagaacctgtgggtgaccgtgtactacggcgtgcccgtgtggaaggaggccaagaccaccctgttctgcgcctccgacgcccgcgcctacgagaaggaggtgcacaacgtgtgggccacccacgcctgcgtgcccaccgacccctccccccaggagctggtgctgggcaacgtgaccgagaacttcaacatgtggaagaacgacatggtggaccagatgcacgaggacatcatctccctgtgggaccagtccctgaagccctgcgtgaagctgacccccctgtgcgtgaccctgatctgctccgacgccaccgtgaagaccggcaccgtggaggagatgaagaactgctccttcaacaccaccaccgagatccgcgacaaggagaagaaggagtacgccctgttctacaagcccgacatcgtgcccctgtccgagaccaacaacacctccgagtaccgcctgatcaactgcaacacctccgcctgcacccaggcctgccccaaggtgaccttcgagcccatccccatccactactgcgcccccgccggctacgccatcctgaagtgcaacgacgagaccttcaacggcaccggcccctgctccaacgtgtccaccgtgcagtgcacccacggcatccgccccgtggtgtccacccagctgctgctgaacggctccctggccgagaaggagatcgtgatccgctccgagaacctgaccaacaacgccaagatcatcatcgtgcacctgcacacccccgtggagatcgtgtgcacccgccccaacaacaacacccgcaagtccgtgcgcatcggccccggccagaccttctacgccaccggcgacaggatcggcgacatcaagcaggcccactgcaacatctccgaggagaagtggaacgacaccctgcagaaggtgggcatcgagctgcagaagcacttccccaacaagaccatcaagtacaaccagtccgccggcggcgacatggagatcaccacccactccttcaactgcggcggcgagttcttctactgcaacacctccaacctgttcaacggcacctacaacggcacctacatctccaccaactcctccgccaactccacctccaccatcaccctgcagtgccgcatcaagcagatcatcaacatgtggcagggcgtgggccgctgcatgtacgccccccccatcgccggcaacatcacctgccgctccaacatcaccggcctgctgctgacccgcgacggcggcaccaactccaacgagaccgagaccttccgccccgccggcggcgacatgcgcgacaactggcgctccgagctgtacaagtacaaggtggtgaagatcgagcccctgggcgtggcccccacccgctgcaagcgccgcgtggtgggccgccgccgccgccgccgcgccgtgggcatcggcgccgtgttcctgggcttcctgggcgccgccggctccaccatgggcgccgcctccatgaccctgaccgtgcaggcccgcaacctgctgtccggcatcgtgcagcagcagtccaacctgctgcgcgcccccgaggcccagcagcacctgctgaagctgaccgtgtggggcatcaagcagctgcaggcccgcgtgctggccgtggagcgctacctgcgcgaccagcagctgctgggcatctggggctgctccggcaagctgatctgctgcaccaacgtgccctggaactcctcctggtccaaccgcaacctgtccgagatctgggacaacatgacctggctgcagtgggacaaggagatctccaactacacccagatcatctacggcctgctggaggagtcccagaaccagcaggagaagaacgagcaggacctgctggccctggactgataagcggccgcggatcc

SEQ ID NO: 184 - protein, 646 aa, synthetic construct
MGSLQPLATLYLLGMLVASVLAAENLWVTVYYGVPVWKEAKTTLFCASDARAYEKEVHNVWATHACVPTDPSPQELVLGNVTENFNMWKNDMVDQMHEDIISLWDQSLKPCVKLTPLCVTLICSDATVKTGTVEEMKNCSFNTTTEIRDKEKKEYALFYKPDIVPLSETNNTSEYRLINCNTSACTQACPKVTFEPIPIHYCAPAGYAILKCNDETFNGTGPCSNVSTVQCTHGIRPVVSTQLLLNGSLAEKEIVIRSENLTNNAKIIIVHLHTPVEIVCTRPNNNTRKSVRIGPGQTFYATGDRIGDIKQAHCNISEEKWNDTLQKVGIELQKHFPNKTIKYNQSAGGDMEITTHSFNCGGEFFYCNTSNLFNGTYNGTYISTNSSANSTSTITLQCRIKQIINMWQGVGRCMYAPPIAGNITCRSNITGLLLTRDGGTNSNETETFRPAGGDMRDNWRSELYKYKVVKIEPLGVAPTRCKRRVVGRRRRRRAVGIGAVFLGFLGAAGSTMGAASMTLTVQARNLLSGIVQQQSNLLRAPEAQQHLLKLTVWGIKQLQARVLAVERYLRDQQLLGIWGCSGKLICCTNVPWNSSWSNRNLSEIWDNMTWLQWDKEISNYTQIIYGLLEESQNQQEKNEQDLLALD

SEQ ID NO: 185 - DNA, 1981 bp, synthetic construct
  source 1..1981: mol_type = other DNA
gtcgacaagcttcccgggccaccatgggctccctgcagcccctggccaccctgtacctgctgggcatgctggtggcctccgtgctggccgccgagaacctgtgggtgaccgtgtactacggcgtgcccgtgtggaaggaggccaagaccaccctgttctgcgcctccgacgcccgcgcctacgagaaggaggtgcacaacgtgtgggccacccacgcctgcgtgcccaccgacccctccccccaggagctggtgctgggcaacgtgaccgagaacttcaacatgtggaagaacgacatggtggaccagatgcacgaggacatcatctccctgtgggaccagtccctgaagccctgcgtgaagctgacccccctgtgcgtgaccctgatctgctccaacgccaccgtgaagaacggcaccgtggaggagatgaagaactgctccttcaacaccaccaccgagatccgcgacaaggagaagaaggagtacgccctgttctacaagcccgacatcgtgcccctgtccgagaccaacaacacctccgagtaccgcctgatcaactgcaacacctccgcctgcacccaggcctgccccaaggtgaccttcgagcccatccccatccactactgcgcccccgccggctacgccatcctgaagtgcaacgacgagaccttcaacggcaccggcccctgctccaacgtgtccaccgtgcagtgcacccacggcatccgccccgtggtgtccacccagctgctgctgaacggctccctggccgagaaggagatcgtgatccgctccgagaacctgaccaacaacgccaagatcatcatcgtgcacctgcacacccccgtggagatcgtgtgcacccgccccaacaacaacacccgcaagtccgtgcgcatcggccccggccagaccttctacgccaccggcgacaagatcggcgacatcaagcaggcccactgcaacatctccgaggagaagtggaacgacaccctgcagaaggtgggcatcgagctgcagaagcacttccccaacaagaccatcaagtacaaccagtccgccggcggcgacatggagatcaccacccactccttcaactgcggcggcgagttcttctactgcaacacctccaacctgttcaacggcacctacaacggcacctacatctccaccaactcctccgccaactccacctccaccatcaccctgcagtgccgcatcaagcagatcatcaacatgtggcagggcgtgggccgctgcatgtacgccccccccatcgccggcaacatcacctgccgctccaacatcaccggcctgctgctgacccgcgacggcggcaccaactccaacgagaccgagaccttccgccccgccggcggcgacatgcgcgacaactggcgctccgagctgtacaagtacaaggtggtgaagatcgagcccctgggcgtggcccccacccgctgcaagcgccgcgtggtgggccgccgccgccgccgccgcgccgtgggcatcggcgccgtgttcctgggcttcctgggcgccgccggctccaccatgggcgccgcctccatgaccctgaccgtgcaggcccgcaacctgctgtccggcatcgtgcagcagcagtccaacctgctgcgcgcccccgaggcccagcagcacctgctgaagctgaccgtgtggggcatcaagcagctgcaggcccgcgtgctggccgtggagcgctacctgcgcgaccagcagctgctgggcatctggggctgctccggcaagctgatctgctgcaccaacgtgccctggaactcctcctggtccaaccgcaacctgtccgagatctgggacaacatgacctggctgcagtgggacaaggagatctccaactacacccagatcatctacggcctgctggaggagtcccagaaccagcaggagaagaacgagcaggacctgctggccctggactgataagcggccgcggatcc

SEQ ID NO: 186 - protein, 646 aa, synthetic construct
MGSLQPLATLYLLGMLVASVLAAENLWVTVYYGVPVWKEAKTTLFCASDARAYEKEVHNVWATHACVPTDPSPQELVLGNVTENFNMWKNDMVDQMHEDIISLWDQSLKPCVKLTPLCVTLICSNATVKNGTVEEMKNCSFNTTTEIRDKEKKEYALFYKPDIVPLSETNNTSEYRLINCNTSACTQACPKVTFEPIPIHYCAPAGYAILKCNDETFNGTGPCSNVSTVQCTHGIRPVVSTQLLLNGSLAEKEIVIRSENLTNNAKIIIVHLHTPVEIVCTRPNNNTRKSVRIGPGQTFYATGDKIGDIKQAHCNISEEKWNDTLQKVGIELQKHFPNKTIKYNQSAGGDMEITTHSFNCGGEFFYCNTSNLFNGTYNGTYISTNSSANSTSTITLQCRIKQIINMWQGVGRCMYAPPIAGNITCRSNITGLLLTRDGGTNSNETETFRPAGGDMRDNWRSELYKYKVVKIEPLGVAPTRCKRRVVGRRRRRRAVGIGAVFLGFLGAAGSTMGAASMTLTVQARNLLSGIVQQQSNLLRAPEAQQHLLKLTVWGIKQLQARVLAVERYLRDQQLLGIWGCSGKLICCTNVPWNSSWSNRNLSEIWDNMTWLQWDKEISNYTQIIYGLLEESQNQQEKNEQDLLALD

SEQ ID NO: 187 - DNA, 1981 bp, synthetic construct
  source 1..1981: mol_type = other DNA
gtcgacaagcttcccgggccaccatgggctccctgcagcccctggccaccctgtacctgctgggcatgctggtggcctccgtgctggccgccgagaacctgtgggtgaccgtgtactacggcgtgcccgtgtggaaggaggccaagaccaccctgttctgcgcctccgacgcccgcgcctacgagaaggaggtgcacaacgtgtgggccacccacgcctgcgtgcccaccgacccctccccccaggagctggtgctgggcaacgtgaccgagaacttcaacatgtggaagaacgacatggtggaccagatgcacgaggacatcatctccctgtgggaccagtccctgaagccctgcgtgaagctgacccccctgtgcgtgaccctgatctgctccaacgccaccgtgaagaacggcaccgtggaggagatgaagaactgctccttcaacaccaccaccgagatccgcgacaaggagaagaaggagtacgccctgttctacaagcccgacatcgtgcccctgtccgagaccaacaacacctccgagtaccgcctgatcaactgcaacacctccgcctgcacccaggcctgccccaaggtgaccttcgagcccatccccatccactactgcgcccccgccggctacgccatcctgaagtgcaacgacgagaccttcaacggcaccggcccctgctccaacgtgtccaccgtgcagtgcacccacggcatccgccccgtggtgtccacccagctgctgctgaacggctccctggccgagaaggagatcgtgatccgctccgagaacctgaccaacaacgccaagatcatcatcgtgcacctgcacaagcccgtgacgatcgtgtgcacccgccccaacaacaacacccgcaagtccgtgcgcatcggccccggccagaccttctacgccaccggcgacaagatcggcgacatcaagcaggcccactgcaacatctccgaggagaagtggaacgacaccctgcagaaggtgggcatcgagctgcagaagcacttccccaacaagaccatcaagtacaaccagtccgccggcggcgacatggagatcaccacccactccttcaactgcggcggcgagttcttctactgcaacacctccaacctgttcaacggcacctacaacggcacctacatctccaccaactcctccgccaagtccacctccaccatcaccctgcagtgccgcatcaagcagatcatcaacatgtggcagggcgtgggccgctgcatgtacgccccccccatcgccggcgccatcacctgccgctccaacatcaccggcctgctgctgacccgcgacggcggcaccaactccaacgagaccgagaccttccgccccgccggcggcgacatgcgcgacaactggcgctccgagctgtacaagtacaaggtggtgaagatcgagcccctgggcgtggcccccacccgctgcaagcgccgcgtggtgggccgccgccgccgccgccgcgccgtgggcatcggcgccgtgttcctgggcttcctgggcgccgccggctccaccatgggcgccgcctccatgaccctgaccgtgcaggcccgcaacctgctgtccggcatcgtgcagcagcagtccaacctgctgcgcgcccccgaggcccagcagcacctgctgaagctgaccgtgtggggcatcaagcagctgcaggcccgcgtgctggccgtggagcgctacctgcgcgaccagcagctgctgggcatctggggctgctccggcaagctgatctgctgcaccaacgtgccctggaactcctcctggtccaaccgcaacctgtccgagatctgggacaacatgacctggctgcagtgggacaaggagatctccaactacacccagatcatctacggcctgctggaggagtcccagaaccagcaggagaagaacgagcaggacctgctggccctggactgataagcggccgcggatcc

SEQ ID NO: 188 - protein, 646 aa, synthetic construct
MGSLQPLATLYLLGMLVASVLAAENLWVTVYYGVPVWKEAKTTLFCASDARAYEKEVHNVWATHACVPTDPSPQELVLGNVTENFNMWKNDMVDQMHEDIISLWDQSLKPCVKLTPLCVTLICSNATVKNGTVEEMKNCSFNTTTEIRDKEKKEYALFYKPDIVPLSETNNTSEYRLINCNTSACTQACPKVTFEPIPIHYCAPAGYAILKCNDETFNGTGPCSNVSTVQCTHGIRPVVSTQLLLNGSLAEKEIVIRSENLTNNAKIIIVHLHKPVTIVCTRPNNNTRKSVRIGPGQTFYATGDKIGDIKQAHCNISEEKWNDTLQKVGIELQKHFPNKTIKYNQSAGGDMEITTHSFNCGGEFFYCNTSNLFNGTYNGTYISTNSSAKSTSTITLQCRIKQIINMWQGVGRCMYAPPIAGAITCRSNITGLLLTRDGGTNSNETETFRPAGGDMRDNWRSELYKYKVVKIEPLGVAPTRCKRRVVGRRRRRRAVGIGAVFLGFLGAAGSTMGAASMTLTVQARNLLSGIVQQQSNLLRAPEAQQHLLKLTVWGIKQLQARVLAVERYLRDQQLLGIWGCSGKLICCTNVPWNSSWSNRNLSEIWDNMTWLQWDKEISNYTQIIYGLLEESQNQQEKNEQDLLALD

SEQ ID NO: 189 - DNA, 1981 bp, synthetic construct
  source 1..1981: mol_type = other DNA
gtcgacaagcttcccgggccaccatgggctccctgcagcccctggccaccctgtacctgctgggcatgctggtggcctccgtgctggccgccgagaacctgtgggtgaccgtgtactacggcgtgcccgtgtggaaggaggccaagaccaccctgttctgcgcctccgacgcccgcgcctacgagaaggaggtgcacaacgtgtgggccacccacgcctgcgtgcccaccgacccctccccccaggagctggtgctgggcaacgtgaccgagaacttcaacatgtggaagaacgacatggtggaccagatgcacgaggacatcatctccctgtgggaccagtccctgaagccctgcgtgaagctgacccccctgtgcgtgaccctgatctgctccgacgccaccgtgaagaccggcaccgtggaggagatgaagaactgctccttcaacaccaccaccgagatccgcgacaaggagaagaaggagtacgccctgttctacaagcccgacatcgtgcccctgtccgagaccaacaacacctccgagtaccgcctgatcaactgcaacacctccgcctgcacccaggcctgccccaaggtgaccttcgagcccatccccatccactactgcgcccccgccggctacgccatcctgaagtgcaacgacgagaccttcaacggcaccggcccctgctccaacgtgtccaccgtgcagtgcacccacggcatccgccccgtggtgtccacccagctgctgctgaacggctccctggccgagaaggagatcgtgatccgctccgagaacctgaccaacaacgccaagatcatcatcgtgcacctgcacacccccgtggagatcgtgtgcacccgccccaacaacaacacccgcaagtccgtgcgcatcggccccggccagaccttctacgccaccggcgacaagatcggcgacatcaagcaggcccactgcaacatctccgaggagaagtggaacgacaccctgcagaaggtgggcatcgagctgcagaagcacttccccaacaagaccatcaagtacaaccagtccgccggcggcgacatggagatcaccacccactccttcaactgcggcggcgagttcttctactgcaacacctccaacctgttcaacggcacctacaacggcacctacatctccaccaactcctccgccaactccacctccaccatcaccctgcagtgccgcatcaagcagatcatcaacatgtggcagggcgtgggccgctgcatgtacgccccccccatcgccggcaacatcacctgccgctccaacatcaccggcctgctgctgacccgcgacggcggcaccaactccaacgagaccgagaccttccgccccgccggcggcgacatgcgcgacaactggcgctccgagctgtacaagtacaaggtggtgaagatcgagcccctgggcgtggcccccacccgctgcaagcgccgcgtggtgggccgccgccgccgccgccgcgccgtgggcatcggcgccgtgttcctgggcttcctgggcgccgccggctccaccatgggcgccgcctccatgaccctgaccgtgcaggcccgcaacctgctgtccggcatcgtgcagcagcagtccaacctgctgcgcgcccccgaggcccagcagcacctgctgaagctgaccgtgtggggcatcaagcagctgcaggcccgcgtgctggccgtggagcgctacctgcgcgaccagcagctgctgggcatctggggctgctccggcaagctgatctgctgcaccaacgtgccctggaactcctcctggtccaaccgcaacctgtccgagatctgggacaacatgacctggctgcagtgggacaaggagatctccaactacacccagatcatctacggcctgctggaggagtcccagaaccagcaggagaagaacgagcaggacctgctggccctggactgataagcggccgcggatcc

SEQ ID NO: 190 - protein, 646 aa, synthetic construct
MGSLQPLATLYLLGMLVASVLAAENLWVTVYYGVPVWKEAKTTLFCASDARAYEKEVHNVWATHACVPTDPSPQELVLGNVTENFNMWKNDMVDQMHEDIISLWDQSLKPCVKLTPLCVTLICSDATVKTGTVEEMKNCSFNTTTEIRDKEKKEYALFYKPDIVPLSETNNTSEYRLINCNTSACTQACPKVTFEPIPIHYCAPAGYAILKCNDETFNGTGPCSNVSTVQCTHGIRPVVSTQLLLNGSLAEKEIVIRSENLTNNAKIIIVHLHTPVEIVCTRPNNNTRKSVRIGPGQTFYATGDKIGDIKQAHCNISEEKWNDTLQKVGIELQKHFPNKTIKYNQSAGGDMEITTHSFNCGGEFFYCNTSNLFNGTYNGTYISTNSSANSTSTITLQCRIKQIINMWQGVGRCMYAPPIAGNITCRSNITGLLLTRDGGTNSNETETFRPAGGDMRDNWRSELYKYKVVKIEPLGVAPTRCKRRVVGRRRRRRAVGIGAVFLGFLGAAGSTMGAASMTLTVQARNLLSGIVQQQSNLLRAPEAQQHLLKLTVWGIKQLQARVLAVERYLRDQQLLGIWGCSGKLICCTNVPWNSSWSNRNLSEIWDNMTWLQWDKEISNYTQIIYGLLEESQNQQEKNEQDLLALD

SEQ ID NO: 191 - DNA, 1981 bp, synthetic construct
  source 1..1981: mol_type = other DNA
gtcgacaagcttcccgggccaccatgggctccctgcagcccctggccaccctgtacctgctgggcatgctggtggcctccgtgctggccgccgagaacctgtgggtgaccgtgtactacggcgtgcccgtgtggaaggaggccaagaccaccctgttctgcgcctccgacgcccgcgcctacgagaaggaggtgcacaacgtgtgggccacccacgcctgcgtgcccaccgacccctccccccaggagctggtgctgggcaacgtgaccgagaacttcaacatgtggaagaacgacatggtggaccagatgcacgaggacatcatctccctgtgggaccagtccctgaagccctgcgtgaagctgacccccctgtgcgtgaccctgatctgctccaacgccaccgtgaagaacggcaccgtggaggagatgaagaactgctccttcaacaccaccaccgagatccgcgacaaggagaagaaggagtacgccctgttctacaagcccgacatcgtgcccctgtccgagaccaacaacacctccgagtaccgcctgatcaactgcaacacctccgcctgcacccaggcctgccccaaggtgaccttcgagcccatccccatccactactgcgcccccgccggctacgccatcctgaagtgcaacgacgagaccttcaacggcaccggcccctgctccaacgtgtccaccgtgcagtgcacccacggcatccgccccgtggtgtccacccagctgctgctgaacggctccctggccgagaaggagatcgtgatccgctccgagaacctgaccaacaacgccaagatcatcatcgtgcacctgcacacccccgtggagatcgtgtgcacccgccccaacaacaacacccgcaagtccgtgcgcatcggccccggccagaccttctacgccaccggcgacatcatcggcgacatcaagcaggcccactgcaacatctccgaggagaagtggaacgacaccctgcagaaggtgggcatcgagctgcagaagcacttccccaacaagaccatcaagtacaaccagtccgccggcggcgacatggagatcaccacccactccttcaactgcggcggcgagttcttctactgcaacacctccaacctgttcaacggcacctacaacggcacctacatctccaccaactcctccgccaactccacctccaccatcaccctgcagtgccgcatcaagcagatcatcaacatgtggcagggcgtgggccgctgcatgtacgccccccccatcgccggcaacatccactgccgctccaacatcaccggcctgctgctgacccgcgacggcggcaccaactccaacgagaccgagaccttccgccccgccggcggcgacatgcgcgacaactggcgctccgagctgtacaagtacaaggtggtgaagatcgagcccctgggcgtggcccccacccgctgcaagcgccgcgtggtgggccgccgccgccgccgccgcgccgtgggcatcggcgccgtgttcctgggcttcctgggcgccgccggctccaccatgggcgccgcctccatgaccctgaccgtgcaggcccgcaacctgctgtccggcatcgtgcagcagcagtccaacctgctgcgcgcccccgaggcccagcagcacctgctgaagctgaccgtgtggggcatcaagcagctgcaggcccgcgtgctggccgtggagcgctacctgcgcgaccagcagctgctgggcatctggggctgctccggcaagctgatctgctgcaccaacgtgccctggaactcctcctggtccaaccgcaacctgtccgagatctgggacaacatgacctggctgcagtgggacaaggagatctccaactacacccagatcatctacggcctgctggaggagtcccagaaccagcaggagaagaacgagcaggacctgctggccctggactgataagcggccgcggatcc

SEQ ID NO: 192 - protein, 646 aa, synthetic construct
MGSLQPLATLYLLGMLVASVLAAENLWVTVYYGVPVWKEAKTTLFCASDARAYEKEVHNVWATHACVPTDPSPQELVLGNVTENFNMWKNDMVDQMHEDIISLWDQSLKPCVKLTPLCVTLICSNATVKNGTVEEMKNCSFNTTTEIRDKEKKEYALFYKPDIVPLSETNNTSEYRLINCNTSACTQACPKVTFEPIPIHYCAPAGYAILKCNDETFNGTGPCSNVSTVQCTHGIRPVVSTQLLLNGSLAEKEIVIRSENLTNNAKIIIVHLHTPVEIVCTRPNNNTRKSVRIGPGQTFYATGDIIGDIKQAHCNISEEKWNDTLQKVGIELQKHFPNKTIKYNQSAGGDMEITTHSFNCGGEFFYCNTSNLFNGTYNGTYISTNSSANSTSTITLQCRIKQIINMWQGVGRCMYAPPIAGNIHCRSNITGLLLTRDGGTNSNETETFRPAGGDMRDNWRSELYKYKVVKIEPLGVAPTRCKRRVVGRRRRRRAVGIGAVFLGFLGAAGSTMGAASMTLTVQARNLLSGIVQQQSNLLRAPEAQQHLLKLTVWGIKQLQARVLAVERYLRDQQLLGIWGCSGKLICCTNVPWNSSWSNRNLSEIWDNMTWLQWDKEISNYTQIIYGLLEESQNQQEKNEQDLLALD

SEQ ID NO: 193 - DNA, 1981 bp, synthetic construct
  source 1..1981: mol_type = other DNA
gtcgacaagcttcccgggccaccatgggctccctgcagcccctggccaccctgtacctgctgggcatgctggtggcctccgtgctggccgccgagaacctgtgggtgaccgtgtactacggcgtgcccgtgtggaaggaggccaagaccaccctgttctgcgcctccgacgcccgcgcctacgagaaggaggtgcacaacgtgtgggccacccacgcctgcgtgcccaccgacccctccccccaggagctggtgctgggcaacgtgaccgagaacttcaacatgtggaagaacgacatggtggaccagatgcacgaggacatcatctccctgtgggaccagtccctgaagccctgcgtgaagctgacccccctgtgcgtgaccctgatctgctccaacgccaccgtgaagaacggcaccgtggaggagatgaagaactgctccttcaacaccaccaccgagatccgcgacaaggagaagaaggagtacgccctgttctacaagcccgacatcgtgcccctgtccgagaccaacaacacctccgagtaccgcctgatcaactgcaacacctccgcctgcacccaggcctgccccaaggtgaccttcgagcccatccccatccactactgcgcccccgccggctacgccatcctgaagtgcaacgacgagaccttcaacggcaccggcccctgctccaacgtgtccaccgtgcagtgcacccacggcatccgccccgtggtgtccacccagctgctgctgaacggctccctggccgagaaggagatcgtgatccgctccgagaacctgaccaacaacgccaagatcatcatcgtgcacctgcacaagcccgtgacgatcgtgtgcacccgccccaacaacaacacccgcaagtccgtgcgcatcggccccggccagaccttctacgccaccggcgacatcatcggcgacatcaagcaggcccactgcaacatctccgaggagaagtggaacgacaccctgcagaaggtgggcatcgagctgcagaagcacttccccaacaagaccatcaagtacaaccagtccgccggcggcgacatggagatcaccacccactccttcaactgcggcggcgagttcttctactgcaacacctccaacctgttcaacggcacctacaacggcacctacatctccaccaactcctccgccaagtccacctccaccatcaccctgcagtgccgcatcaagcagatcatcaacatgtggcagggcgtgggccgctgcatgtacgccccccccatcgccggcgccatccactgccgctccaacatcaccggcctgctgctgacccgcgacggcggcaccaactccaacgagaccgagaccttccgccccgccggcggcgacatgcgcgacaactggcgctccgagctgtacaagtacaaggtggtgaagatcgagcccctgggcgtggcccccacccgctgcaagcgccgcgtggtgggccgccgccgccgccgccgcgccgtgggcatcggcgccgtgttcctgggcttcctgggcgccgccggctccaccatgggcgccgcctccatgaccctgaccgtgcaggcccgcaacctgctgtccggcatcgtgcagcagcagtccaacctgctgcgcgcccccgaggcccagcagcacctgctgaagctgaccgtgtggggcatcaagcagctgcaggcccgcgtgctggccgtggagcgctacctgcgcgaccagcagctgctgggcatctggggctgctccggcaagctgatctgctgcaccaacgtgccctggaactcctcctggtccaaccgcaacctgtccgagatctgggacaacatgacctggctgcagtgggacaaggagatctccaactacacccagatcatctacggcctgctggaggagtcccagaaccagcaggagaagaacgagcaggacctgctggccctggactgataagcggccgcggatcc

SEQ ID NO: 194 - protein, 646 aa, synthetic construct
MGSLQPLATLYLLGMLVASVLAAENLWVTVYYGVPVWKEAKTTLFCASDARAYEKEVHNVWATHACVPTDPSPQELVLGNVTENFNMWKNDMVDQMHEDIISLWDQSLKPCVKLTPLCVTLICSNATVKNGTVEEMKNCSFNTTTEIRDKEKKEYALFYKPDIVPLSETNNTSEYRLINCNTSACTQACPKVTFEPIPIHYCAPAGYAILKCNDETFNGTGPCSNVSTVQCTHGIRPVVSTQLLLNGSLAEKEIVIRSENLTNNAKIIIVHLHKPVTIVCTRPNNNTRKSVRIGPGQTFYATGDIIGDIKQAHCNISEEKWNDTLQKVGIELQKHFPNKTIKYNQSAGGDMEITTHSFNCGGEFFYCNTSNLFNGTYNGTYISTNSSAKSTSTITLQCRIKQIINMWQGVGRCMYAPPIAGAIHCRSNITGLLLTRDGGTNSNETETFRPAGGDMRDNWRSELYKYKVVKIEPLGVAPTRCKRRVVGRRRRRRAVGIGAVFLGFLGAAGSTMGAASMTLTVQARNLLSGIVQQQSNLLRAPEAQQHLLKLTVWGIKQLQARVLAVERYLRDQQLLGIWGCSGKLICCTNVPWNSSWSNRNLSEIWDNMTWLQWDKEISNYTQIIYGLLEESQNQQEKNEQDLLALD

SEQ ID NO: 195 - DNA, 1981 bp, synthetic construct
  source 1..1981: mol_type = other DNA
gtcgacaagcttcccgggccaccatgggctccctgcagcccctggccaccctgtacctgctgggcatgctggtggcctccgtgctggccgccgagaacctgtgggtgaccgtgtactacggcgtgcccgtgtggaaggaggccaagaccaccctgttctgcgcctccgacgcccgcgcctacgagaaggaggtgcacaacgtgtgggccacccacgcctgcgtgcccaccgacccctccccccaggagctggtgctgggcaacgtgaccgagaacttcaacatgtggaagaacgacatggtggaccagatgcacgaggacatcatctccctgtgggaccagtccctgaagccctgcgtgaagctgacccccctgtgcgtgaccctgatctgctccgacgccaccgtgaagaccggcaccgtggaggagatgaagaactgctccttcaacaccaccaccgagatccgcgacaaggagaagaaggagtacgccctgttctacaagcccgacatcgtgcccctgtccgagaccaacaacacctccgagtaccgcctgatcaactgcaacacctccgcctgcacccaggcctgccccaaggtgaccttcgagcccatccccatccactactgcgcccccgccggctacgccatcctgaagtgcaacgacgagaccttcaacggcaccggcccctgctccaacgtgtccaccgtgcagtgcacccacggcatccgccccgtggtgtccacccagctgctgctgaacggctccctggccgagaaggagatcgtgatccgctccgagaacctgaccaacaacgccaagatcatcatcgtgcacctgcacacccccgtggagatcgtgtgcacccgccccaacaacaacacccgcaagtccgtgcgcatcggccccggccagaccttctacgccaccggcgacatcatcggcgacatcaagcaggcccactgcaacatctccgaggagaagtggaacgacaccctgcagaaggtgggcatcgagctgcagaagcacttccccaacaagaccatcaagtacaaccagtccgccggcggcgacatggagatcaccacccactccttcaactgcggcggcgagttcttctactgcaacacctccaacctgttcaacggcacctacaacggcacctacatctccaccaactcctccgccaactccacctccaccatcaccctgcagtgccgcatcaagcagatcatcaacatgtggcagggcgtgggccgctgcatgtacgccccccccatcgccggcaacatccactgccgctccaacatcaccggcctgctgctgacccgcgacggcggcaccaactccaacgagaccgagaccttccgccccgccggcggcgacatgcgcgacaactggcgctccgagctgtacaagtacaaggtggtgaagatcgagcccctgggcgtggcccccacccgctgcaagcgccgcgtggtgggccgccgccgccgccgccgcgccgtgggcatcggcgccgtgttcctgggcttcctgggcgccgccggctccaccatgggcgccgcctccatgaccctgaccgtgcaggcccgcaacctgctgtccggcatcgtgcagcagcagtccaacctgctgcgcgcccccgaggcccagcagcacctgctgaagctgaccgtgtggggcatcaagcagctgcaggcccgcgtgctggccgtggagcgctacctgcgcgaccagcagctgctgggcatctggggctgctccggcaagctgatctgctgcaccaacgtgccctggaactcctcctggtccaaccgcaacctgtccgagatctgggacaacatgacctggctgcagtgggacaaggagatctccaactacacccagatcatctacggcctgctggaggagtcccagaaccagcaggagaagaacgagcaggacctgctggccctggactgataagcggccgcggatcc

SEQ ID NO: 196 - protein, 646 aa, synthetic construct
MGSLQPLATLYLLGMLVASVLAAENLWVTVYYGVPVWKEAKTTLFCASDARAYEKEVHNVWATHACVPTDPSPQELVLGNVTENFNMWKNDMVDQMHEDIISLWDQSLKPCVKLTPLCVTLICSDATVKTGTVEEMKNCSFNTTTEIRDKEKKEYALFYKPDIVPLSETNNTSEYRLINCNTSACTQACPKVTFEPIPIHYCAPAGYAILKCNDETFNGTGPCSNVSTVQCTHGIRPVVSTQLLLNGSLAEKEIVIRSENLTNNAKIIIVHLHTPVEIVCTRPNNNTRKSVRIGPGQTFYATGDIIGDIKQAHCNISEEKWNDTLQKVGIELQKHFPNKTIKYNQSAGGDMEITTHSFNCGGEFFYCNTSNLFNGTYNGTYISTNSSANSTSTITLQCRIKQIINMWQGVGRCMYAPPIAGNIHCRSNITGLLLTRDGGTNSNETETFRPAGGDMRDNWRSELYKYKVVKIEPLGVAPTRCKRRVVGRRRRRRAVGIGAVFLGFLGAAGSTMGAASMTLTVQARNLLSGIVQQQSNLLRAPEAQQHLLKLTVWGIKQLQARVLAVERYLRDQQLLGIWGCSGKLICCTNVPWNSSWSNRNLSEIWDNMTWLQWDKEISNYTQIIYGLLEESQNQQEKNEQDLLALD

SEQ ID NO: 197 - DNA, 1981 bp, synthetic construct
  source 1..1981: mol_type = other DNA
gtcgacaagcttcccgggccaccatgggctccctgcagcccctggccaccctgtacctgctgggcatgctggtggcctccgtgctggccgccgagaacctgtgggtgaccgtgtactacggcgtgcccgtgtggaaggaggccaagaccaccctgttctgcgcctccgacgcccgcgcctacgagaaggaggtgcacaacgtgtgggccacccacgcctgcgtgcccaccgacccctccccccaggagctggtgctgggcaacgtgaccgagaacttcaacatgtggaagaacgacatggtggaccagatgcacgaggacatcatctccctgtgggaccagtccctgaagccctgcgtgaagctgacccccctgtgcgtgaccctgatctgctccaacgccaccgtgaagaacggcaccgtggaggagatgaagaactgctccttcaacaccaccaccgagatccgcgacaaggagaagaaggagtacgccctgttctacaagcccgacatcgtgcccctgtccgagaccaacaacacctccgagtaccgcctgatcaactgcaacacctccgcctgcacccaggcctgccccaaggtgaccttcgagcccatccccatccactactgcgcccccgccggctacgccatcctgaagtgcaacgacgagaccttcaacggcaccggcccctgctccaacgtgtccaccgtgcagtgcacccacggcatccgccccgtggtgtccacccagctgctgctgaacggctccctggccgagaaggagatcgtgatccgctccgagaacctgaccaacaacgccaagatcatcatcgtgcacctgcacacccccgtggagatcgtgtgcacccgccccaacaacaacacccgcaagtccgtgcgcatcggccccggccagaccttctacgccaccggcgacatcatcggcgacatcaagcaggcccactgcaacatctccgaggagaagtggaacgacaccctgcagaaggtgggcatcgagctgcagaagcacttccccaacaagaccatcaagtacaaccagtccgccggcggcgacatggagatcaccacccactccttcaactgcggcggcgagttcttctactgcaacacctccaacctgttcaacggcacctacaacggcacctacatctccaccaactcctccgccaactccacctccaccatcaccctgcagtgccgcatcaagcagatcatcaacatgtggcagggcgtgggccgctgcatgtacgccccccccatcgccggcaacatcggctgccgctccaacatcaccggcctgctgctgacccgcgacggcggcaccaactccaacgagaccgagaccttccgccccgccggcggcgacatgcgcgacaactggcgctccgagctgtacaagtacaaggtggtgaagatcgagcccctgggcgtggcccccacccgctgcaagcgccgcgtggtgggccgccgccgccgccgccgcgccgtgggcatcggcgccgtgttcctgggcttcctgggcgccgccggctccaccatgggcgccgcctccatgaccctgaccgtgcaggcccgcaacctgctgtccggcatcgtgcagcagcagtccaacctgctgcgcgcccccgaggcccagcagcacctgctgaagctgaccgtgtggggcatcaagcagctgcaggcccgcgtgctggccgtggagcgctacctgcgcgaccagcagctgctgggcatctggggctgctccggcaagctgatctgctgcaccaacgtgccctggaactcctcctggtccaaccgcaacctgtccgagatctgggacaacatgacctggctgcagtgggacaaggagatctccaactacacccagatcatctacggcctgctggaggagtcccagaaccagcaggagaagaacgagcaggacctgctggccctggactgataagcggccgcggatcc

SEQ ID NO: 198 - protein, 646 aa, synthetic construct
MGSLQPLATLYLLGMLVASVLAAENLWVTVYYGVPVWKEAKTTLFCASDARAYEKEVHNVWATHACVPTDPSPQELVLGNVTENFNMWKNDMVDQMHEDIISLWDQSLKPCVKLTPLCVTLICSNATVKNGTVEEMKNCSFNTTTEIRDKEKKEYALFYKPDIVPLSETNNTSEYRLINCNTSACTQACPKVTFEPIPIHYCAPAGYAILKCNDETFNGTGPCSNVSTVQCTHGIRPVVSTQLLLNGSLAEKEIVIRSENLTNNAKIIIVHLHTPVEIVCTRPNNNTRKSVRIGPGQTFYATGDIIGDIKQAHCNISEEKWNDTLQKVGIELQKHFPNKTIKYNQSAGGDMEITTHSFNCGGEFFYCNTSNLFNGTYNGTYISTNSSANSTSTITLQCRIKQIINMWQGVGRCMYAPPIAGNIGCRSNITGLLLTRDGGTNSNETETFRPAGGDMRDNWRSELYKYKVVKIEPLGVAPTRCKRRVVGRRRRRRAVGIGAVFLGFLGAAGSTMGAASMTLTVQARNLLSGIVQQQSNLLRAPEAQQHLLKLTVWGIKQLQARVLAVERYLRDQQLLGIWGCSGKLICCTNVPWNSSWSNRNLSEIWDNMTWLQWDKEISNYTQIIYGLLEESQNQQEKNEQDLLALD

SEQ ID NO: 199 - DNA, 1981 bp, synthetic construct
  source 1..1981: mol_type = other DNA
gtcgacaagcttcccgggccaccatgggctccctgcagcccctggccaccctgtacctgctgggcatgctggtggcctccgtgctggccgccgagaacctgtgggtgaccgtgtactacggcgtgcccgtgtggaaggaggccaagaccaccctgttctgcgcctccgacgcccgcgcctacgagaaggaggtgcacaacgtgtgggccacccacgcctgcgtgcccaccgacccctccccccaggagctggtgctgggcaacgtgaccgagaacttcaacatgtggaagaacgacatggtggaccagatgcacgaggacatcatctccctgtgggaccagtccctgaagccctgcgtgaagctgacccccctgtgcgtgaccctgatctgctccaacgccaccgtgaagaacggcaccgtggaggagatgaagaactgctccttcaacaccaccaccgagatccgcgacaaggagaagaaggagtacgccctgttctacaagcccgacatcgtgcccctgtccgagaccaacaacacctccgagtaccgcctgatcaactgcaacacctccgcctgcacccaggcctgccccaaggtgaccttcgagcccatccccatccactactgcgcccccgccggctacgccatcctgaagtgcaacgacgagaccttcaacggcaccggcccctgctccaacgtgtccaccgtgcagtgcacccacggcatccgccccgtggtgtccacccagctgctgctgaacggctccctggccgagaaggagatcgtgatccgctccgagaacctgaccaacaacgccaagatcatcatcgtgcacctgcacaagcccgtgacgatcgtgtgcacccgccccaacaacaacacccgcaagtccgtgcgcatcggccccggccagaccttctacgccaccggcgacatcatcggcgacatcaagcaggcccactgcaacatctccgaggagaagtggaacgacaccctgcagaaggtgggcatcgagctgcagaagcacttccccaacaagaccatcaagtacaaccagtccgccggcggcgacatggagatcaccacccactccttcaactgcggcggcgagttcttctactgcaacacctccaacctgttcaacggcacctacaacggcacctacatctccaccaactcctccgccaagtccacctccaccatcaccctgcagtgccgcatcaagcagatcatcaacatgtggcagggcgtgggccgctgcatgtacgccccccccatcgccggcgccatcggctgccgctccaacatcaccggcctgctgctgacccgcgacggcggcaccaactccaacgagaccgagaccttccgccccgccggcggcgacatgcgcgacaactggcgctccgagctgtacaagtacaaggtggtgaagatcgagcccctgggcgtggcccccacccgctgcaagcgccgcgtggtgggccgccgccgccgccgccgcgccgtgggcatcggcgccgtgttcctgggcttcctgggcgccgccggctccaccatgggcgccgcctccatgaccctgaccgtgcaggcccgcaacctgctgtccggcatcgtgcagcagcagtccaacctgctgcgcgcccccgaggcccagcagcacctgctgaagctgaccgtgtggggcatcaagcagctgcaggcccgcgtgctggccgtggagcgctacctgcgcgaccagcagctgctgggcatctggggctgctccggcaagctgatctgctgcaccaacgtgccctggaactcctcctggtccaaccgcaacctgtccgagatctgggacaacatgacctggctgcagtgggacaaggagatctccaactacacccagatcatctacggcctgctggaggagtcccagaaccagcaggagaagaacgagcaggacctgctggccctggactgataagcggccgcggatcc

SEQ ID NO: 200 - protein, 646 aa, synthetic construct
MGSLQPLATLYLLGMLVASVLAAENLWVTVYYGVPVWKEAKTTLFCASDARAYEKEVHNVWATHACVPTDPSPQELVLGNVTENFNMWKNDMVDQMHEDIISLWDQSLKPCVKLTPLCVTLICSNATVKNGTVEEMKNCSFNTTTEIRDKEKKEYALFYKPDIVPLSETNNTSEYRLINCNTSACTQACPKVTFEPIPIHYCAPAGYAILKCNDETFNGTGPCSNVSTVQCTHGIRPVVSTQLLLNGSLAEKEIVIRSENLTNNAKIIIVHLHKPVTIVCTRPNNNTRKSVRIGPGQTFYATGDIIGDIKQAHCNISEEKWNDTLQKVGIELQKHFPNKTIKYNQSAGGDMEITTHSFNCGGEFFYCNTSNLFNGTYNGTYISTNSSAKSTSTITLQCRIKQIINMWQGVGRCMYAPPIAGAIGCRSNITGLLLTRDGGTNSNETETFRPAGGDMRDNWRSELYKYKVVKIEPLGVAPTRCKRRVVGRRRRRRAVGIGAVFLGFLGAAGSTMGAASMTLTVQARNLLSGIVQQQSNLLRAPEAQQHLLKLTVWGIKQLQARVLAVERYLRDQQLLGIWGCSGKLICCTNVPWNSSWSNRNLSEIWDNMTWLQWDKEISNYTQIIYGLLEESQNQQEKNEQDLLALD

SEQ ID NO: 201 - DNA, 1981 bp, synthetic construct
  source 1..1981: mol_type = other DNA
gtcgacaagcttcccgggccaccatgggctccctgcagcccctggccaccctgtacctgctgggcatgctggtggcctccgtgctggccgccgagaacctgtgggtgaccgtgtactacggcgtgcccgtgtggaaggaggccaagaccaccctgttctgcgcctccgacgcccgcgcctacgagaaggaggtgcacaacgtgtgggccacccacgcctgcgtgcccaccgacccctccccccaggagctggtgctgggcaacgtgaccgagaacttcaacatgtggaagaacgacatggtggaccagatgcacgaggacatcatctccctgtgggaccagtccctgaagccctgcgtgaagctgacccccctgtgcgtgaccctgatctgctccgacgccaccgtgaagaccggcaccgtggaggagatgaagaactgctccttcaacaccaccaccgagatccgcgacaaggagaagaaggagtacgccctgttctacaagcccgacatcgtgcccctgtccgagaccaacaacacctccgagtaccgcctgatcaactgcaacacctccgcctgcacccaggcctgccccaaggtgaccttcgagcccatccccatccactactgcgcccccgccggctacgccatcctgaagtgcaacgacgagaccttcaacggcaccggcccctgctccaacgtgtccaccgtgcagtgcacccacggcatccgccccgtggtgtccacccagctgctgctgaacggctccctggccgagaaggagatcgtgatccgctccgagaacctgaccaacaacgccaagatcatcatcgtgcacctgcacacccccgtggagatcgtgtgcacccgccccaacaacaacacccgcaagtccgtgcgcatcggccccggccagaccttctacgccaccggcgacatcatcggcgacatcaagcaggcccactgcaacatctccgaggagaagtggaacgacaccctgcagaaggtgggcatcgagctgcagaagcacttccccaacaagaccatcaagtacaaccagtccgccggcggcgacatggagatcaccacccactccttcaactgcggcggcgagttcttctactgcaacacctccaacctgttcaacggcacctacaacggcacctacatctccaccaactcctccgccaactccacctccaccatcaccctgcagtgccgcatcaagcagatcatcaacatgtggcagggcgtgggccgctgcatgtacgccccccccatcgccggcaacatcggctgccgctccaacatcaccggcctgctgctgacccgcgacggcggcaccaactccaacgagaccgagaccttccgccccgccggcggcgacatgcgcgacaactggcgctccgagctgtacaagtacaaggtggtgaagatcgagcccctgggcgtggcccccacccgctgcaagcgccgcgtggtgggccgccgccgccgccgccgcgccgtgggcatcggcgccgtgttcctgggcttcctgggcgccgccggctccaccatgggcgccgcctccatgaccctgaccgtgcaggcccgcaacctgctgtccggcatcgtgcagcagcagtccaacctgctgcgcgcccccgaggcccagcagcacctgctgaagctgaccgtgtggggcatcaagcagctgcaggcccgcgtgctggccgtggagcgctacctgcgcgaccagcagctgctgggcatctggggctgctccggcaagctgatctgctgcaccaacgtgccctggaactcctcctggtccaaccgcaacctgtccgagatctgggacaacatgacctggctgcagtgggacaaggagatctccaactacacccagatcatctacggcctgctggaggagtcccagaaccagcaggagaagaacgagcaggacctgctggccctggactgataagcggccgcggatcc

SEQ ID NO: 202 - protein, 646 aa, synthetic construct
MGSLQPLATLYLLGMLVASVLAAENLWVTVYYGVPVWKEAKTTLFCASDARAYEKEVHNVWATHACVPTDPSPQELVLGNVTENFNMWKNDMVDQMHEDIISLWDQSLKPCVKLTPLCVTLICSDATVKTGTVEEMKNCSFNTTTEIRDKEKKEYALFYKPDIVPLSETNNTSEYRLINCNTSACTQACPKVTFEPIPIHYCAPAGYAILKCNDETFNGTGPCSNVSTVQCTHGIRPVVSTQLLLNGSLAEKEIVIRSENLTNNAKIIIVHLHTPVEIVCTRPNNNTRKSVRIGPGQTFYATGDIIGDIKQAHCNISEEKWNDTLQKVGIELQKHFPNKTIKYNQSAGGDMEITTHSFNCGGEFFYCNTSNLFNGTYNGTYISTNSSANSTSTITLQCRIKQIINMWQGVGRCMYAPPIAGNIGCRSNITGLLLTRDGGTNSNETETFRPAGGDMRDNWRSELYKYKVVKIEPLGVAPTRCKRRVVGRRRRRRAVGIGAVFLGFLGAAGSTMGAASMTLTVQARNLLSGIVQQQSNLLRAPEAQQHLLKLTVWGIKQLQARVLAVERYLRDQQLLGIWGCSGKLICCTNVPWNSSWSNRNLSEIWDNMTWLQWDKEISNYTQIIYGLLEESQNQQEKNEQDLLALD

SEQ ID NO: 203 - DNA, 1981 bp, synthetic construct
  source 1..1981: mol_type = other DNA
gtcgacaagcttcccgggccaccatgggctccctgcagcccctggccaccctgtacctgctgggcatgctggtggcctccgtgctggccgccgagaacctgtgggtgaccgtgtactacggcgtgcccgtgtggaaggaggccaagaccaccctgttctgcgcctccgacgcccgcgcctacgagaaggaggtgcacaacgtgtgggccacccacgcctgcgtgcccaccgacccctccccccaggagctggtgctgggcaacgtgaccgagaacttcaacatgtggaagaacgacatggtggaccagatgcacgaggacatcatctccctgtgggaccagtccctgaagccctgcgtgaagctgacccccctgtgcgtgaccctgatctgctccaacgccaccgtgaagaacggcaccgtggaggagatgaagaactgctccttcaacaccaccaccgagatccgcgacaaggagaagaaggagtacgccctgttctacaagcccgacatcgtgcccctgtccgagaccaacaacacctccgagtaccgcctgatcaactgcaacacctccgcctgcacccaggcctgccccaaggtgaccttcgagcccatccccatccactactgcgcccccgccggctacgccatcctgaagtgcaacgacgagaccttcaacggcaccggcccctgctccaacgtgtccaccgtgcagtgcacccacggcatccgccccgtggtgtccacccagctgctgctgaacggctccctggccgagaaggagatcgtgatccgctccgagaacctgaccaacaacgccaagatcatcatcgtgcacctgcacacccccgtggagatcgtgtgcacccgccccaacaacaacacccgcaagtccgtgcgcatcggccccggccagaccttctacgccaccggcgacatcatcggcgacatcaagcaggcccactgcaacatctccgaggagaagtggaacgacaccctgcagaaggtgggcatcgagctgcagaagcacttccccaacaagaccatcaagtacaaccagtccgccggcggcgacatggagatcaccacccactccttcaactgcggcggcgagttcttctactgcaacacctccaacctgttcaacggcacctacaacggcacctacatctccaccaactcctccgccaactccacctccaccatcaccctgcagtgccgcatcaagcagatcatcaacatgtggcagggcgtgggccgctgcatgtacgccccccccgccgccggcaacgccacctgccgctccaacatcaccggcctgctgctgacccgcgacggcggcaccaactccaacgagaccgagaccttccgccccgccggcggcgacatgcgcgacaactggcgctccgagctgtacaagtacaaggtggtgaagatcgagcccctgggcgtggcccccacccgctgcaagcgccgcgtggtgggccgccgccgccgccgccgcgccgtgggcatcggcgccgtgttcctgggcttcctgggcgccgccggctccaccatgggcgccgcctccatgaccctgaccgtgcaggcccgcaacctgctgtccggcatcgtgcagcagcagtccaacctgctgcgcgcccccgaggcccagcagcacctgctgaagctgaccgtgtggggcatcaagcagctgcaggcccgcgtgctggccgtggagcgctacctgcgcgaccagcagctgctgggcatctggggctgctccggcaagctgatctgctgcaccaacgtgccctggaactcctcctggtccaaccgcaacctgtccgagatctgggacaacatgacctggctgcagtgggacaaggagatctccaactacacccagatcatctacggcctgctggaggagtcccagaaccagcaggagaagaacgagcaggacctgctggccctggactgataagcggccgcggatcc

SEQ ID NO: 204 - protein, 646 aa, synthetic construct
MGSLQPLATLYLLGMLVASVLAAENLWVTVYYGVPVWKEAKTTLFCASDARAYEKEVHNVWATHACVPTDPSPQELVLGNVTENFNMWKNDMVDQMHEDIISLWDQSLKPCVKLTPLCVTLICSNATVKNGTVEEMKNCSFNTTTEIRDKEKKEYALFYKPDIVPLSETNNTSEYRLINCNTSACTQACPKVTFEPIPIHYCAPAGYAILKCNDETFNGTGPCSNVSTVQCTHGIRPVVSTQLLLNGSLAEKEIVIRSENLTNNAKIIIVHLHTPVEIVCTRPNNNTRKSVRIGPGQTFYATGDIIGDIKQAHCNISEEKWNDTLQKVGIELQKHFPNKTIKYNQSAGGDMEITTHSFNCGGEFFYCNTSNLFNGTYNGTYISTNSSANSTSTITLQCRIKQIINMWQGVGRCMYAPPAAGNATCRSNITGLLLTRDGGTNSNETETFRPAGGDMRDNWRSELYKYKVVKIEPLGVAPTRCKRRVVGRRRRRRAVGIGAVFLGFLGAAGSTMGAASMTLTVQARNLLSGIVQQQSNLLRAPEAQQHLLKLTVWGIKQLQARVLAVERYLRDQQLLGIWGCSGKLICCTNVPWNSSWSNRNLSEIWDNMTWLQWDKEISNYTQIIYGLLEESQNQQEKNEQDLLALD

SEQ ID NO: 205 - DNA, 1981 bp, synthetic construct
  source 1..1981: mol_type = other DNA
gtcgacaagcttcccgggccaccatgggctccctgcagcccctggccaccctgtacctgctgggcatgctggtggcctccgtgctggccgccgagaacctgtgggtgaccgtgtactacggcgtgcccgtgtggaaggaggccaagaccaccctgttctgcgcctccgacgcccgcgcctacgagaaggaggtgcacaacgtgtgggccacccacgcctgcgtgcccaccgacccctccccccaggagctggtgctgggcaacgtgaccgagaacttcaacatgtggaagaacgacatggtggaccagatgcacgaggacatcatctccctgtgggaccagtccctgaagccctgcgtgaagctgacccccctgtgcgtgaccctgatctgctccaacgccaccgtgaagaacggcaccgtggaggagatgaagaactgctccttcaacaccaccaccgagatccgcgacaaggagaagaaggagtacgccctgttctacaagcccgacatcgtgcccctgtccgagaccaacaacacctccgagtaccgcctgatcaactgcaacacctccgcctgcacccaggcctgccccaaggtgaccttcgagcccatccccatccactactgcgcccccgccggctacgccatcctgaagtgcaacgacgagaccttcaacggcaccggcccctgctccaacgtgtccaccgtgcagtgcacccacggcatccgccccgtggtgtccacccagctgctgctgaacggctccctggccgagaaggagatcgtgatccgctccgagaacctgaccaacaacgccaagatcatcatcgtgcacctgcacaagcccgtgacgatcgtgtgcacccgccccaacaacaacacccgcaagtccgtgcgcatcggccccggccagaccttctacgccaccggcgacatcatcggcgacatcaagcaggcccactgcaacatctccgaggagaagtggaacgacaccctgcagaaggtgggcatcgagctgcagaagcacttccccaacaagaccatcaagtacaaccagtccgccggcggcgacatggagatcaccacccactccttcaactgcggcggcgagttcttctactgcaacacctccaacctgttcaacggcacctacaacggcacctacatctccaccaactcctccgccaagtccacctccaccatcaccctgcagtgccgcatcaagcagatcatcaacatgtggcagggcgtgggccgctgcatgtacgccccccccgccgccggcgccgccacctgccgctccaacatcaccggcctgctgctgacccgcgacggcggcaccaactccaacgagaccgagaccttccgccccgccggcggcgacatgcgcgacaactggcgctccgagctgtacaagtacaaggtggtgaagatcgagcccctgggcgtggcccccacccgctgcaagcgccgcgtggtgggccgccgccgccgccgccgcgccgtgggcatcggcgccgtgttcctgggcttcctgggcgccgccggctccaccatgggcgccgcctccatgaccctgaccgtgcaggcccgcaacctgctgtccggcatcgtgcagcagcagtccaacctgctgcgcgcccccgaggcccagcagcacctgctgaagctgaccgtgtggggcatcaagcagctgcaggcccgcgtgctggccgtggagcgctacctgcgcgaccagcagctgctgggcatctggggctgctccggcaagctgatctgctgcaccaacgtgccctggaactcctcctggtccaaccgcaacctgtccgagatctgggacaacatgacctggctgcagtgggacaaggagatctccaactacacccagatcatctacggcctgctggaggagtcccagaaccagcaggagaagaacgagcaggacctgctggccctggactgataagcggccgcggatcc

SEQ ID NO: 206 - protein, 646 aa, synthetic construct
MGSLQPLATLYLLGMLVASVLAAENLWVTVYYGVPVWKEAKTTLFCASDARAYEKEVHNVWATHACVPTDPSPQELVLGNVTENFNMWKNDMVDQMHEDIISLWDQSLKPCVKLTPLCVTLICSNATVKNGTVEEMKNCSFNTTTEIRDKEKKEYALFYKPDIVPLSETNNTSEYRLINCNTSACTQACPKVTFEPIPIHYCAPAGYAILKCNDETFNGTGPCSNVSTVQCTHGIRPVVSTQLLLNGSLAEKEIVIRSENLTNNAKIIIVHLHKPVTIVCTRPNNNTRKSVRIGPGQTFYATGDIIGDIKQAHCNISEEKWNDTLQKVGIELQKHFPNKTIKYNQSAGGDMEITTHSFNCGGEFFYCNTSNLFNGTYNGTYISTNSSAKSTSTITLQCRIKQIINMWQGVGRCMYAPPAAGAATCRSNITGLLLTRDGGTNSNETETFRPAGGDMRDNWRSELYKYKVVKIEPLGVAPTRCKRRVVGRRRRRRAVGIGAVFLGFLGAAGSTMGAASMTLTVQARNLLSGIVQQQSNLLRAPEAQQHLLKLTVWGIKQLQARVLAVERYLRDQQLLGIWGCSGKLICCTNVPWNSSWSNRNLSEIWDNMTWLQWDKEISNYTQIIYGLLEESQNQQEKNEQDLLALD

SEQ ID NO: 207 - DNA, 1981 bp, synthetic construct
  source 1..1981: mol_type = other DNA
gtcgacaagcttcccgggccaccatgggctccctgcagcccctggccaccctgtacctgctgggcatgctggtggcctccgtgctggccgccgagaacctgtgggtgaccgtgtactacggcgtgcccgtgtggaaggaggccaagaccaccctgttctgcgcctccgacgcccgcgcctacgagaaggaggtgcacaacgtgtgggccacccacgcctgcgtgcccaccgacccctccccccaggagctggtgctgggcaacgtgaccgagaacttcaacatgtggaagaacgacatggtggaccagatgcacgaggacatcatctccctgtgggaccagtccctgaagccctgcgtgaagctgacccccctgtgcgtgaccctgatctgctccgacgccaccgtgaagaccggcaccgtggaggagatgaagaactgctccttcaacaccaccaccgagatccgcgacaaggagaagaaggagtacgccctgttctacaagcccgacatcgtgcccctgtccgagaccaacaacacctccgagtaccgcctgatcaactgcaacacctccgcctgcacccaggcctgccccaaggtgaccttcgagcccatccccatccactactgcgcccccgccggctacgccatcctgaagtgcaacgacgagaccttcaacggcaccggcccctgctccaacgtgtccaccgtgcagtgcacccacggcatccgccccgtggtgtccacccagctgctgctgaacggctccctggccgagaaggagatcgtgatccgctccgagaacctgaccaacaacgccaagatcatcatcgtgcacctgcacacccccgtggagatcgtgtgcacccgccccaacaacaacacccgcaagtccgtgcgcatcggccccggccagaccttctacgccaccggcgacatcatcggcgacatcaagcaggcccactgcaacatctccgaggagaagtggaacgacaccctgcagaaggtgggcatcgagctgcagaagcacttccccaacaagaccatcaagtacaaccagtccgccggcggcgacatggagatcaccacccactccttcaactgcggcggcgagttcttctactgcaacacctccaacctgttcaacggcacctacaacggcacctacatctccaccaactcctccgccaactccacctccaccatcaccctgcagtgccgcatcaagcagatcatcaacatgtggcagggcgtgggccgctgcatgtacgccccccccgccgccggcaacgccacctgccgctccaacatcaccggcctgctgctgacccgcgacggcggcaccaactccaacgagaccgagaccttccgccccgccggcggcgacatgcgcgacaactggcgctccgagctgtacaagtacaaggtggtgaagatcgagcccctgggcgtggcccccacccgctgcaagcgccgcgtggtgggccgccgccgccgccgccgcgccgtgggcatcggcgccgtgttcctgggcttcctgggcgccgccggctccaccatgggcgccgcctccatgaccctgaccgtgcaggcccgcaacctgctgtccggcatcgtgcagcagcagtccaacctgctgcgcgcccccgaggcccagcagcacctgctgaagctgaccgtgtggggcatcaagcagctgcaggcccgcgtgctggccgtggagcgctacctgcgcgaccagcagctgctgggcatctggggctgctccggcaagctgatctgctgcaccaacgtgccctggaactcctcctggtccaaccgcaacctgtccgagatctgggacaacatgacctggctgcagtgggacaaggagatctccaactacacccagatcatctacggcctgctggaggagtcccagaaccagcaggagaagaacgagcaggacctgctggccctggactgataagcggccgcggatcc

SEQ ID NO: 208 - protein, 646 aa, synthetic construct
MGSLQPLATLYLLGMLVASVLAAENLWVTVYYGVPVWKEAKTTLFCASDARAYEKEVHNVWATHACVPTDPSPQELVLGNVTENFNMWKNDMVDQMHEDIISLWDQSLKPCVKLTPLCVTLICSDATVKTGTVEEMKNCSFNTTTEIRDKEKKEYALFYKPDIVPLSETNNTSEYRLINCNTSACTQACPKVTFEPIPIHYCAPAGYAILKCNDETFNGTGPCSNVSTVQCTHGIRPVVSTQLLLNGSLAEKEIVIRSENLTNNAKIIIVHLHTPVEIVCTRPNNNTRKSVRIGPGQTFYATGDIIGDIKQAHCNISEEKWNDTLQKVGIELQKHFPNKTIKYNQSAGGDMEITTHSFNCGGEFFYCNTSNLFNGTYNGTYISTNSSANSTSTITLQCRIKQIINMWQGVGRCMYAPPAAGNATCRSNITGLLLTRDGGTNSNETETFRPAGGDMRDNWRSELYKYKVVKIEPLGVAPTRCKRRVVGRRRRRRAVGIGAVFLGFLGAAGSTMGAASMTLTVQARNLLSGIVQQQSNLLRAPEAQQHLLKLTVWGIKQLQARVLAVERYLRDQQLLGIWGCSGKLICCTNVPWNSSWSNRNLSEIWDNMTWLQWDKEISNYTQIIYGLLEESQNQQEKNEQDLLALD

SEQ ID NO: 209 - DNA, 1981 bp, synthetic construct
  source 1..1981: mol_type = other DNA
gtcgacaagcttcccgggccaccatgggctccctgcagcccctggccaccctgtacctgctgggcatgctggtggcctccgtgctggccgccgagaacctgtgggtgaccgtgtactacggcgtgcccgtgtggaaggaggccaagaccaccctgttctgcgcctccgacgcccgcgcctacgagaaggaggtgcacaacgtgtgggccacccacgcctgcgtgcccaccgacccctccccccaggagctggtgctgggcaacgtgaccgagaacttcaacatgtggaagaacgacatggtggaccagatgcacgaggacatcatctccctgtgggaccagtccctgaagccctgcgtgaagctgacccccctgtgcgtgaccctgatctgctccaacgccaccgtgaagaacggcaccgtggaggagatgaagaactgctccttcaacaccaccaccgagatccgcgacaaggagaagaaggagtacgccctgttctacaagcccgacatcgtgcccctgtccgagaccaacaacacctccgagtaccgcctgatcaactgcaacacctccgcctgcacccaggcctgccccaaggtgaccttcgagcccatccccatccactactgcgcccccgccggctacgccatcctgaagtgcaacgacgagaccttcaacggcaccggcccctgctccaacgtgtccaccgtgcagtgcacccacggcatccgccccgtggtgtccacccagctgctgctgaacggctccctggccgagaaggagatcgtgatccgctccgagaacctgaccaacaacgccaagatcatcatcgtgcacctgcacacccccgtggagatcgtgtgcacccgccccaacaacaacacccgcaagtccgtgcgcatcggccccggccagaccttctacgccaccggcgacatcatcggcgacatcaagcaggcccactgcaacatctccgaggagaagtggaacgacaccctgcagaaggtgggcatcgagctgcagaagcacttccccaacaagaccatcaagtacaaccagtccgccggcggcgacatggagatcaccacccactccttcaactgcggcggcgagttcttctactgcaacacctccaacctgttcaacggcacctacaacggcacctacatctccaccaactcctccgccaactccacctccaccatcaccctgcagtgccgcatcaagcagatcatcaacatgtggcagggcgtgggccgctgcatgtacgccccccccaacgccggcaacaacacctgccgctccaacatcaccggcctgctgctgacccgcgacggcggcaccaactccaacgagaccgagaccttccgccccgccggcggcgacatgcgcgacaactggcgctccgagctgtacaagtacaaggtggtgaagatcgagcccctgggcgtggcccccacccgctgcaagcgccgcgtggtgggccgccgccgccgccgccgcgccgtgggcatcggcgccgtgttcctgggcttcctgggcgccgccggctccaccatgggcgccgcctccatgaccctgaccgtgcaggcccgcaacctgctgtccggcatcgtgcagcagcagtccaacctgctgcgcgcccccgaggcccagcagcacctgctgaagctgaccgtgtggggcatcaagcagctgcaggcccgcgtgctggccgtggagcgctacctgcgcgaccagcagctgctgggcatctggggctgctccggcaagctgatctgctgcaccaacgtgccctggaactcctcctggtccaaccgcaacctgtccgagatctgggacaacatgacctggctgcagtgggacaaggagatctccaactacacccagatcatctacggcctgctggaggagtcccagaaccagcaggagaagaacgagcaggacctgctggccctggactgataagcggccgcggatcc

SEQ ID NO: 210 - protein, 646 aa, synthetic construct
MGSLQPLATLYLLGMLVASVLAAENLWVTVYYGVPVWKEAKTTLFCASDARAYEKEVHNVWATHACVPTDPSPQELVLGNVTENFNMWKNDMVDQMHEDIISLWDQSLKPCVKLTPLCVTLICSNATVKNGTVEEMKNCSFNTTTEIRDKEKKEYALFYKPDIVPLSETNNTSEYRLINCNTSACTQACPKVTFEPIPIHYCAPAGYAILKCNDETFNGTGPCSNVSTVQCTHGIRPVVSTQLLLNGSLAEKEIVIRSENLTNNAKIIIVHLHTPVEIVCTRPNNNTRKSVRIGPGQTFYATGDIIGDIKQAHCNISEEKWNDTLQKVGIELQKHFPNKTIKYNQSAGGDMEITTHSFNCGGEFFYCNTSNLFNGTYNGTYISTNSSANSTSTITLQCRIKQIINMWQGVGRCMYAPPNAGNNTCRSNITGLLLTRDGGTNSNETETFRPAGGDMRDNWRSELYKYKVVKIEPLGVAPTRCKRRVVGRRRRRRAVGIGAVFLGFLGAAGSTMGAASMTLTVQARNLLSGIVQQQSNLLRAPEAQQHLLKLTVWGIKQLQARVLAVERYLRDQQLLGIWGCSGKLICCTNVPWNSSWSNRNLSEIWDNMTWLQWDKEISNYTQIIYGLLEESQNQQEKNEQDLLALD

SEQ ID NO: 211 - DNA, 1981 bp, synthetic construct
  source 1..1981: mol_type = other DNA
gtcgacaagcttcccgggccaccatgggctccctgcagcccctggccaccctgtacctgctgggcatgctggtggcctccgtgctggccgccgagaacctgtgggtgaccgtgtactacggcgtgcccgtgtggaaggaggccaagaccaccctgttctgcgcctccgacgcccgcgcctacgagaaggaggtgcacaacgtgtgggccacccacgcctgcgtgcccaccgacccctccccccaggagctggtgctgggcaacgtgaccgagaacttcaacatgtggaagaacgacatggtggaccagatgcacgaggacatcatctccctgtgggaccagtccctgaagccctgcgtgaagctgacccccctgtgcgtgaccctgatctgctccaacgccaccgtgaagaacggcaccgtggaggagatgaagaactgctccttcaacaccaccaccgagatccgcgacaaggagaagaaggagtacgccctgttctacaagcccgacatcgtgcccctgtccgagaccaacaacacctccgagtaccgcctgatcaactgcaacacctccgcctgcacccaggcctgccccaaggtgaccttcgagcccatccccatccactactgcgcccccgccggctacgccatcctgaagtgcaacgacgagaccttcaacggcaccggcccctgctccaacgtgtccaccgtgcagtgcacccacggcatccgccccgtggtgtccacccagctgctgctgaacggctccctggccgagaaggagatcgtgatccgctccgagaacctgaccaacaacgccaagatcatcatcgtgcacctgcacaagcccgtgacgatcgtgtgcacccgccccaacaacaacacccgcaagtccgtgcgcatcggccccggccagaccttctacgccaccggcgacatcatcggcgacatcaagcaggcccactgcaacatctccgaggagaagtggaacgacaccctgcagaaggtgggcatcgagctgcagaagcacttccccaacaagaccatcaagtacaaccagtccgccggcggcgacatggagatcaccacccactccttcaactgcggcggcgagttcttctactgcaacacctccaacctgttcaacggcacctacaacggcacctacatctccaccaactcctccgccaagtccacctccaccatcaccctgcagtgccgcatcaagcagatcatcaacatgtggcagggcgtgggccgctgcatgtacgccccccccaacgccggcgccaacacctgccgctccaacatcaccggcctgctgctgacccgcgacggcggcaccaactccaacgagaccgagaccttccgccccgccggcggcgacatgcgcgacaactggcgctccgagctgtacaagtacaaggtggtgaagatcgagcccctgggcgtggcccccacccgctgcaagcgccgcgtggtgggccgccgccgccgccgccgcgccgtgggcatcggcgccgtgttcctgggcttcctgggcgccgccggctccaccatgggcgccgcctccatgaccctgaccgtgcaggcccgcaacctgctgtccggcatcgtgcagcagcagtccaacctgctgcgcgcccccgaggcccagcagcacctgctgaagctgaccgtgtggggcatcaagcagctgcaggcccgcgtgctggccgtggagcgctacctgcgcgaccagcagctgctgggcatctggggctgctccggcaagctgatctgctgcaccaacgtgccctggaactcctcctggtccaaccgcaacctgtccgagatctgggacaacatgacctggctgcagtgggacaaggagatctccaactacacccagatcatctacggcctgctggaggagtcccagaaccagcaggagaagaacgagcaggacctgctggccctggactgataagcggccgcggatcc

SEQ ID NO: 212 - protein, 646 aa, synthetic construct
MGSLQPLATLYLLGMLVASVLAAENLWVTVYYGVPVWKEAKTTLFCASDARAYEKEVHNVWATHACVPTDPSPQELVLGNVTENFNMWKNDMVDQMHEDIISLWDQSLKPCVKLTPLCVTLICSNATVKNGTVEEMKNCSFNTTTEIRDKEKKEYALFYKPDIVPLSETNNTSEYRLINCNTSACTQACPKVTFEPIPIHYCAPAGYAILKCNDETFNGTGPCSNVSTVQCTHGIRPVVSTQLLLNGSLAEKEIVIRSENLTNNAKIIIVHLHKPVTIVCTRPNNNTRKSVRIGPGQTFYATGDIIGDIKQAHCNISEEKWNDTLQKVGIELQKHFPNKTIKYNQSAGGDMEITTHSFNCGGEFFYCNTSNLFNGTYNGTYISTNSSAKSTSTITLQCRIKQIINMWQGVGRCMYAPPNAGANTCRSNITGLLLTRDGGTNSNETETFRPAGGDMRDNWRSELYKYKVVKIEPLGVAPTRCKRRVVGRRRRRRAVGIGAVFLGFLGAAGSTMGAASMTLTVQARNLLSGIVQQQSNLLRAPEAQQHLLKLTVWGIKQLQARVLAVERYLRDQQLLGIWGCSGKLICCTNVPWNSSWSNRNLSEIWDNMTWLQWDKEISNYTQIIYGLLEESQNQQEKNEQDLLALD

SEQ ID NO: 213 - DNA, 1981 bp, synthetic construct
  source 1..1981: mol_type = other DNA
gtcgacaagcttcccgggccaccatgggctccctgcagcccctggccaccctgtacctgctgggcatgctggtggcctccgtgctggccgccgagaacctgtgggtgaccgtgtactacggcgtgcccgtgtggaaggaggccaagaccaccctgttctgcgcctccgacgcccgcgcctacgagaaggaggtgcacaacgtgtgggccacccacgcctgcgtgcccaccgacccctccccccaggagctggtgctgggcaacgtgaccgagaacttcaacatgtggaagaacgacatggtggaccagatgcacgaggacatcatctccctgtgggaccagtccctgaagccctgcgtgaagctgacccccctgtgcgtgaccctgatctgctccgacgccaccgtgaagaccggcaccgtggaggagatgaagaactgctccttcaacaccaccaccgagatccgcgacaaggagaagaaggagtacgccctgttctacaagcccgacatcgtgcccctgtccgagaccaacaacacctccgagtaccgcctgatcaactgcaacacctccgcctgcacccaggcctgccccaaggtgaccttcgagcccatccccatccactactgcgcccccgccggctacgccatcctgaagtgcaacgacgagaccttcaacggcaccggcccctgctccaacgtgtccaccgtgcagtgcacccacggcatccgccccgtggtgtccacccagctgctgctgaacggctccctggccgagaaggagatcgtgatccgctccgagaacctgaccaacaacgccaagatcatcatcgtgcacctgcacacccccgtggagatcgtgtgcacccgccccaacaacaacacccgcaagtccgtgcgcatcggccccggccagaccttctacgccaccggcgacatcatcggcgacatcaagcaggcccactgcaacatctccgaggagaagtggaacgacaccctgcagaaggtgggcatcgagctgcagaagcacttccccaacaagaccatcaagtacaaccagtccgccggcggcgacatggagatcaccacccactccttcaactgcggcggcgagttcttctactgcaacacctccaacctgttcaacggcacctacaacggcacctacatctccaccaactcctccgccaactccacctccaccatcaccctgcagtgccgcatcaagcagatcatcaacatgtggcagggcgtgggccgctgcatgtacgccccccccaacgccggcaacaacacctgccgctccaacatcaccggcctgctgctgacccgcgacggcggcaccaactccaacgagaccgagaccttccgccccgccggcggcgacatgcgcgacaactggcgctccgagctgtacaagtacaaggtggtgaagatcgagcccctgggcgtggcccccacccgctgcaagcgccgcgtggtgggccgccgccgccgccgccgcgccgtgggcatcggcgccgtgttcctgggcttcctgggcgccgccggctccaccatgggcgccgcctccatgaccctgaccgtgcaggcccgcaacctgctgtccggcatcgtgcagcagcagtccaacctgctgcgcgcccccgaggcccagcagcacctgctgaagctgaccgtgtggggcatcaagcagctgcaggcccgcgtgctggccgtggagcgctacctgcgcgaccagcagctgctgggcatctggggctgctccggcaagctgatctgctgcaccaacgtgccctggaactcctcctggtccaaccgcaacctgtccgagatctgggacaacatgacctggctgcagtgggacaaggagatctccaactacacccagatcatctacggcctgctggaggagtcccagaaccagcaggagaagaacgagcaggacctgctggccctggactgataagcggccgcggatcc

SEQ ID NO: 214 - protein, 646 aa, synthetic construct
MGSLQPLATLYLLGMLVASVLAAENLWVTVYYGVPVWKEAKTTLFCASDARAYEKEVHNVWATHACVPTDPSPQELVLGNVTENFNMWKNDMVDQMHEDIISLWDQSLKPCVKLTPLCVTLICSDATVKTGTVEEMKNCSFNTTTEIRDKEKKEYALFYKPDIVPLSETNNTSEYRLINCNTSACTQACPKVTFEPIPIHYCAPAGYAILKCNDETFNGTGPCSNVSTVQCTHGIRPVVSTQLLLNGSLAEKEIVIRSENLTNNAKIIIVHLHTPVEIVCTRPNNNTRKSVRIGPGQTFYATGDIIGDIKQAHCNISEEKWNDTLQKVGIELQKHFPNKTIKYNQSAGGDMEITTHSFNCGGEFFYCNTSNLFNGTYNGTYISTNSSANSTSTITLQCRIKQIINMWQGVGRCMYAPPNAGNNTCRSNITGLLLTRDGGTNSNETETFRPAGGDMRDNWRSELYKYKVVKIEPLGVAPTRCKRRVVGRRRRRRAVGIGAVFLGFLGAAGSTMGAASMTLTVQARNLLSGIVQQQSNLLRAPEAQQHLLKLTVWGIKQLQARVLAVERYLRDQQLLGIWGCSGKLICCTNVPWNSSWSNRNLSEIWDNMTWLQWDKEISNYTQIIYGLLEESQNQQEKNEQDLLALD

SEQ ID NO: 215 - DNA, 1947 bp, synthetic construct
  source 1..1947: mol_type = other DNA
atgggatctctgcaacctctggccacactgtacctgctgggaatgctggtggcttctgtgctggccgccgagaatctgtgggtcacagtgtactatggcgtgcccgtgtggaaagaggccaagaccacactgttctgtgccagcgacgccaaggcctacaagaaagaggtgcacaacgtctgggccacacacgcctgtgtgcctaccgatccatctcctcaagagctgttcctggaaaacgtgaccgagaacttcaacatgtggaagaacgacatggtggaccagatgcacgaggacatcatcagcctgtgggaccagagcctgaagccttgcgtgaagctgacccctctgtgcgtgaccctgatctgtagcaccgccaccgtgaacaacagagccgtggacgagatgaagaactgcagcttcaacaccaccaccgagatccgggacaagaagaagaaagagtacgccctgttctatcggagcgacgtggtgcccctggacgagacaaacaacaccagcgagtaccggctgatcaactgcaacacctccgcctgcactcaggcctgtcctaaagtgaccttcgagcccattcctatccactactgtgcccctgccggctacgccatcctgaagtgcaacgacgagacattcaacggcacaggcccctgcagcaatgtgtccaccgtgcagtgtacccacggcatcagaccagtggtgtctacccagctgctgctgaatggaagcctggccgagaaagaaatcgtgatcagaagcgagaacctgaccaacaacgccaagatcatcattgtgcatctgcacacccctgtggaaatcgtgtgcacccggcctaacaacaacacccggaagtctgtgcggatcggccctggccagacattctatgccaccggcgatatcatcggcgacatcaagcaggcccactgcaacatcagcgaggaaaagtggaacgagacactgcagaaagtgggcatcgagctgcagaagcacttccccaacaagaccatcaagtacaaccagagcgctggcggcgacatggaaatcaccacacacagcttcaattgtggcggcgagttcttctactgcaataccagcaagctgttcaacagcacctacaacggcacctatatcagcaccaactccaccaatagcaccagctacatcaccctgcagtgccggatcaagcagatcatcaatatgtggcaaggcgtcggccggtgtatgtacgcccctcctatcgccggcaacatcacctgtcggagcaatatcacaggcctgctgctcaccagagatggcggcatcaacaacgtgtccaacgagacagaaaccttccggcctgccggcggagacatgagagacaattggagaagcgagctgtacaagtacaaggtggtcaagatcgagcccctgggcgtcgcaccaacacggtgcaagagaagagtcgtgggccgtcgtagaaggcggagagccgttggaattggcgccgtgttcctgggctttctgggagccgctggatctacaatgggcgctgccagcatgaccctgacagtgcaggctagaaatctgctgagcggcatcgtgcagcagcagagcaatctgctcagagcccctgaggctcagcagcacctcctgaaactgacagtgtggggaatcaagcagctgcaggccagagtgctggcagtggaaagatacctgagggaccagcagctcctcggaatctggggatgtagcggcaagctgatctgctgcaccaacgtgccctggaactccagctggtccaaccggaatctgagcgagatctgggataacatgacctggctgcagtgggacaaagagatcagcaactacacccagatcatctacggcctgctggaagagagccagaaccagcaagagaaaaacgagcaggacctgctggccctggactgataa

SEQ ID NO: 216 - protein, 647 aa, synthetic construct
MGSLQPLATLYLLGMLVASVLAAENLWVTVYYGVPVWKEAKTTLFCASDAKAYKKEVHNVWATHACVPTDPSPQELFLENVTENFNMWKNDMVDQMHEDIISLWDQSLKPCVKLTPLCVTLICSTATVNNRAVDEMKNCSFNTTTEIRDKKKKEYALFYRSDVVPLDETNNTSEYRLINCNTSACTQACPKVTFEPIPIHYCAPAGYAILKCNDETFNGTGPCSNVSTVQCTHGIRPVVSTQLLLNGSLAEKEIVIRSENLTNNAKIIIVHLHTPVEIVCTRPNNNTRKSVRIGPGQTFYATGDIIGDIKQAHCNISEEKWNETLQKVGIELQKHFPNKTIKYNQSAGGDMEITTHSFNCGGEFFYCNTSKLFNSTYNGTYISTNSTNSTSYITLQCRIKQIINMWQGVGRCMYAPPIAGNITCRSNITGLLLTRDGGINNVSNETETFRPAGGDMRDNWRSELYKYKVVKIEPLGVAPTRCKRRVVGRRRRRRAVGIGAVFLGFLGAAGSTMGAASMTLTVQARNLLSGIVQQQSNLLRAPEAQQHLLKLTVWGIKQLQARVLAVERYLRDQQLLGIWGCSGKLICCTNVPWNSSWSNRNLSEIWDNMTWLQWDKEISNYTQIIYGLLEESQNQQEKNEQDLLALD

SEQ ID NO: 217 - DNA, 2559 bp, synthetic construct
  source 1..2559: mol_type = other DNA
atgagagtgacggggatactgaggaattatccacaatggtggatatggggcatcttaggcttttggatgctaatgacttgtaatggggaaggaaacttgtgggtcacagtctactatggggtaccagtatggaaagaagcaaaaactactctgttttgtgcatcagatgccaaagcgtataagaaagaagtgcataatgtctgggcgacacatgcctgtgtacccacagaccccagcccacaagaactgtttttggaaaatgtaacagaaaattttaacatgtggaaaaatgatatggtagatcagatgcatgaggatataatcagtctatgggatcaaagcctaaagccatgtgtaaagttgaccccactctgtgtcactttaatttgtagtactgctactgttaacaatagagcagttgatgaaatgaaaaattgctccttcaatacaaccacagaaataagagataagaaaaagaaggaatatgcacttttttatagatctgatgtagtaccacttgatgaaacaaacaataccagtgagtatagattaataaattgtaatacctcagccgtaacacaagcctgtccaaaggtcacttttgaaccaattcctatacattattgtgctccagctggttatgcgattctaaagtgcaatgatgagacattcaatggaacaggaccatgcagtaatgtcagcacagtacaatgtacacatggaattaggccagtggtatcaacccaactactgttaaatggtagtctggcagaaaaagagatagtaattagatctgaaaacctgacaaacaatgccaaaataataatagtccatcttcacacccctgtagaaattgtgtgtacaaggcccggccataatacaaggaaaagtgtgagaataggcccaggacaaacattctatgcaacaggagacataataggagatataagacaagcacattgtaacattaatgaaagtaaatggaatgaaactttacaaaaggtaggtatagaattgcaaaaacacttccctaataagacaataaagtataaccaatccgcaggaggagacatggaaattacaacacatagctttaattgtggaggagaatttttctattgcaatacatcaaagctgtttaatagtacatacaatggtacatacataagtacaaacagcacaaacagtacttcatacatcacgcttcaatgcagaataaaacaaattataaacatgtggcagggggtaggaagagcaatgtatgctcctcccattgcaggaaacataacatgtagatcaaatatcacagggctactattgacacgtgatggagggatcaataatgttagcaacgagacagagacattcaggcctgcaggaggagatatgagggataattggagaagtgaattatataaatataaagtagtagaagttcagccattaggaatagcaccaactggtgcaaaaaggagagtggtggagagagaaaaaagagcagcaggactaggagctttgttccttgggttcttgggagcagcaggaagcactatgggcgcagcatcaataacgctgacggtacaggccagacaattgttgtctggtatagtgcaacagcaaagcaatttgctgagggctatagaggcgcaacagcatatgttgcaactcacggtctggggcatcaagcagctccaggcaagagtcctggctctggaaagatacctaaaggatcaacagctcctagggatgtggggctgctctggaaaactcatctgcaccactaatgtgccttggaacactagttggagtaataaatctgaaatggatatttggaataacatgacatggatgcagtgggaaagagaaattagcaattacacagagacaatatacatgttgcttgaagactcgcaacgccagcaggagagaaatgaaaaagatttactagcattggacagttggaacagtctgtggaattggtttaacataacaaactggctgtggtatataaaaatattcataatgatagtagggggcttgataggtttaagaatagtttttgctgtgctatctatagtgaatagagtcaggcagggatactcacctttgtcgttgcagacccttaccccaaacccgagggaacccgacaggctcagaggaatcgaagaagaaggtggagagcaagacagagacagatccattcgattagtgagcggattcttgccaattgtctgggacgacctgcggagcctgtgcctcttcagttaccaccgattgagagactttctattgctggcagcgagagtggtggaacttctgggacacagcagtctcaggggactgcagagggggtgggaagtccttaagtatctgggaagtcttgtgcagtattggggtctggaactaaaaaggagtgctattagtctttttgataccctagcaatagcagtagctgaaggaacagataggattatagaattaatacaaggattttgtagagctatccgcaacatacctacaagaataagacaaggctttgaagcatctttgctataataa

SEQ ID NO: 218 - DNA, 1947 bp, synthetic construct
  source 1..1947: mol_type = other DNA
atgggatctctgcagcctctggccacactgtacctgctgggaatgctggtggcttctgtgctggccgccgagaatctgtgggtcacagtgtactatggcgtgcccgtgtggaaagaggccaagaccacactgttctgtgccagcgacgccaaggcctacaagaaagaggtgcacaacgtctgggccacacacgcctgtgtgcctaccgatccatctcctcaagagctgttcctggaaaacgtgaccgagaacttcaacatgtggaagaacgacatggtggaccagatgcacgaggacatcatcagcctgtgggaccagagcctgaagccttgcgtgaagctgacccctctgtgcgtgaccctgatctgtagcaccgccaccgtgaacaacagagccgtggacgagatgaagaactgcagcttcaacaccaccaccgagatccgggacaagaagaagaaagagtacgccctgttctatcggagcgacgtggtgcccctggacgagacaaacaacaccagcgagtaccggctgatcaactgcaacacctccgcctgcacacaggcttgccccaaagtgaccttcgagcccattcctatccactactgtgcccctgccggctacgccatcctgaagtgcaacgacgagacattcaacggcacaggcccctgcagcaatgtgtccaccgtgcagtgtacccacggcatcagaccagtggtgtctacccagctgctgctgaatggaagcctggccgagaaagaaatcgtgatcagaagcgagaacctgaccaacaacgccaagatcatcattgtgcatctgcacacccctgtggaaatcgtgtgcaccagacctggccacaacacccggaagtctgtgcggattggacccggccagaccttttatgccaccggcgatatcatcggcgacatcagacaggcccactgtaacatcaacgagagcaagtggaacgagacactgcagaaagtgggcatcgagctgcagaagcacttccccaacaagaccatcaagtacaaccagagcgctggcggcgacatggaaatcaccacacacagcttcaattgtggcggcgagttcttctactgcaataccagcaagctgttcaacagcacctacaacggcacctatatcagcaccaactccaccaatagcaccagctacatcaccctgcagtgccggatcaagcagatcatcaatatgtggcaaggcgtgggcagatgcatgtacgcccctcctatcgccggcaacatcacctgtcggagcaatatcacaggcctgctgctcaccagagatggcggcatcaacaacgtgtccaacgagacagaaaccttccggcctgccggcggagacatgagagacaattggagaagcgagctgtacaagtacaaggtggtcaagatcgagcccctgggcgtcgcaccaacacggtgcaagagaagagtcgtgggacgtagacgaaggcggagagccgttggaatcggagccgtgttcctgggctttctgggagccgctggatctacaatgggcgctgccagcatgaccctgacagtgcaggctagaaatctgctgagcggcatcgtgcagcagcagagcaatctgctcagagcccctgaggctcagcagcacctcctgaaactgacagtgtggggcatcaagcagctgcaggcaagagtgctggcagtggaaagatacctgcgggaccagcagctcctcggaatctggggatgtagcggcaagctgatctgctgcaccaacgtgccctggaactccagctggtccaaccggaatctgagcgagatctgggataacatgacctggctgcagtgggacaaagagatcagcaactacacccagatcatctacggcctgctggaagagagccagaaccagcaagagaaaaacgagcaggacctgctggccctggactgataa

SEQ ID NO: 219 - DNA, 1947 bp, synthetic construct
  source 1..1947: mol_type = other DNA
atgggatctctgcagcctctggccacactgtacctgctgggaatgctggtggcttctgtgctggccgccgagaatctgtgggtcacagtgtactatggcgtgcccgtgtggaaagaggcctgtaccacactgttctgtgccagcgacgccaaggcctacaagaaaaaggtgcgcaacgtctgggccacacactgctgtgtgcctaccgatccatctcctcaagagctgttcctggaaaacgtgaccgagaacttcaacatgtggaagaacgacatggtggaccagatgcacgaggacatcatcagcctgtgggaccagagcctgaagccttgcgtgaagctgacccctctgtgcgtgaccctgatctgtagcaccgccaccgtgaacaacagagccgtggacgagatgaagaactgcagcttcaacaccaccaccgagatccgggacaagaagaagaaagagtacgccctgttctatcggagcgacgtggtgcccctggacgagacaaacaacaccagcgagtaccggctgatcaactgcaacacctccgccgtgacacaggcttgccccaaagtgaccttcgagcccattcctatccactactgtgcccctgccggctacgccatcctgaagtgcaacgacgagacattcaacggcacaggcccctgcagcaatgtgtccaccgtgcagtgtacccacggcatcagaccagtggtgtctacccagctgctgctgaatggaagcctggccgagaaagaaatcgtgatcagaagcgagaacctgaccaacaacgccaagatcatcattgtgcatctgcacacccctgtggaaatcgtgtgcaccagacctggccacaacacccggaagtctgtgcggattggacccggccagtggttttatgccaccggcgatatcatcggcgacatcagacaggcccactgtaacatcaacgagagcaagtggaacgagacactgcagaaagtgggcatcgagctgcagaagcacttccccaacaagaccatcaagtacaaccagagcgctggcggcgacatggaaatcaccacacacagcttcaattgtggcggcgagttcttctactgcaataccagcaagctgttcaacagcacctacaacggcacctatatcagcaccaactccaccaatagcaccagctacatcaccctgcagtgccggatcaagcagatcatcaatatgtggcaaggcgtgggcagagctatgtacgcccctcctatcgccggcaacatcacctgtcggagcaatatcacaggcctgctgctcaccagagatggcggcatcaacaacgtgtccaacgagacagaaaccttccggcctgccggcggagacatgagagacaattggagaagcgagctgtacaagtacaaggtggtcaagatcgagcccctgggcgtcgcaccaacacggtgcaagagaagagtcgtgggacgtagacgaaggcggagagccgttggaatcggagccgtgttcctgggctttctgggagccgctggatctacaatgggcgctgccagcatgaccctgacagtgcaggctagaaatctgctgagcggcatcgtgcagcagcagagcaattgcctcagagcccctgagtgtcagcagcacctcctgaaactgacagtgtggggcatcaagcagctgcaggcaagagtgctggcagtggaaagatacctgcgggaccagcagctcctcggaatctggggatgtagcggcaagctgatctgctgcaccaacgtgccctggaactccagctggtccaaccggaatctgagcgagatctgggataacatgacctggctgcagtgggacaaagagatcagcaactacacccagatcatctacggcctgctggaagagagccagaaccagcaagagaaaaacgagcaggacctgctggccctggactgataa

SEQ ID NO: 220 - protein, 851 aa, synthetic construct
MRVTGILRNYPQWWIWGILGFWMLMTCNGEGNLWVTVYYGVPVWKEAKTTLFCASDAKAYKKEVHNVWATHACVPTDPSPQELFLENVTENFNMWKNDMVDQMHEDIISLWDQSLKPCVKLTPLCVTLICSTATVNNRAVDEMKNCSFNTTTEIRDKKKKEYALFYRSDVVPLDETNNTSEYRLINCNTSAVTQACPKVTFEPIPIHYCAPAGYAILKCNDETFNGTGPCSNVSTVQCTHGIRPVVSTQLLLNGSLAEKEIVIRSENLTNNAKIIIVHLHTPVEIVCTRPGHNTRKSVRIGPGQTFYATGDIIGDIRQAHCNINESKWNETLQKVGIELQKHFPNKTIKYNQSAGGDMEITTHSFNCGGEFFYCNTSKLFNSTYNGTYISTNSTNSTSYITLQCRIKQIINMWQGVGRAMYAPPIAGNITCRSNITGLLLTRDGGINNVSNETETFRPAGGDMRDNWRSELYKYKVVEVQPLGIAPTGAKRRVVEREKRAAGLGALFLGFLGAAGSTMGAASITLTVQARQLLSGIVQQQSNLLRAIEAQQHMLQLTVWGIKQLQARVLALERYLKDQQLLGMWGCSGKLICTTNVPWNTSWSNKSEMDIWNNMTWMQWEREISNYTETIYMLLEDSQRQQERNEKDLLALDSWNSLWNWFNITNWLWYIKIFIMIVGGLIGLRIVFAVLSIVNRVRQGYSPLSLQTLTPNPREPDRLRGIEEEGGEQDRDRSIRLVSGFLPIVWDDLRSLCLFSYHRLRDFLLLAARVVELLGHSSLRGLQRGWEVLKYLGSLVQYWGLELKRSAISLFDTLAIAVAEGTDRIIELIQGFCRAIRNIPTRIRQGFEASLL

SEQ ID NO: 221 - protein, 647 aa, synthetic construct
MGSLQPLATLYLLGMLVASVLAAENLWVTVYYGVPVWKEAKTTLFCASDAKAYKKEVHNVWATHACVPTDPSPQELFLENVTENFNMWKNDMVDQMHEDIISLWDQSLKPCVKLTPLCVTLICSTATVNNRAVDEMKNCSFNTTTEIRDKKKKEYALFYRSDVVPLDETNNTSEYRLINCNTSACTQACPKVTFEPIPIHYCAPAGYAILKCNDETFNGTGPCSNVSTVQCTHGIRPVVSTQLLLNGSLAEKEIVIRSENLTNNAKIIIVHLHTPVEIVCTRPGHNTRKSVRIGPGQTFYATGDIIGDIRQAHCNINESKWNETLQKVGIELQKHFPNKTIKYNQSAGGDMEITTHSFNCGGEFFYCNTSKLFNSTYNGTYISTNSTNSTSYITLQCRIKQIINMWQGVGRCMYAPPIAGNITCRSNITGLLLTRDGGINNVSNETETFRPAGGDMRDNWRSELYKYKVVKIEPLGVAPTRCKRRVVGRRRRRRAVGIGAVFLGFLGAAGSTMGAASMTLTVQARNLLSGIVQQQSNLLRAPEAQQHLLKLTVWGIKQLQARVLAVERYLRDQQLLGIWGCSGKLICCTNVPWNSSWSNRNLSEIWDNMTWLQWDKEISNYTQIIYGLLEESQNQQEKNEQDLLALD

SEQ ID NO: 222 - protein, 647 aa, synthetic construct
MGSLQPLATLYLLGMLVASVLAAENLWVTVYYGVPVWKEACTTLFCASDAKAYKKKVRNVWATHCCVPTDPSPQELFLENVTENFNMWKNDMVDQMHEDIISLWDQSLKPCVKLTPLCVTLICSTATVNNRAVDEMKNCSFNTTTEIRDKKKKEYALFYRSDVVPLDETNNTSEYRLINCNTSAVTQACPKVTFEPIPIHYCAPAGYAILKCNDETFNGTGPCSNVSTVQCTHGIRPVVSTQLLLNGSLAEKEIVIRSENLTNNAKIIIVHLHTPVEIVCTRPGHNTRKSVRIGPGQWFYATGDIIGDIRQAHCNINESKWNETLQKVGIELQKHFPNKTIKYNQSAGGDMEITTHSFNCGGEFFYCNTSKLFNSTYNGTYISTNSTNSTSYITLQCRIKQIINMWQGVGRAMYAPPIAGNITCRSNITGLLLTRDGGINNVSNETETFRPAGGDMRDNWRSELYKYKVVKIEPLGVAPTRCKRRVVGRRRRRRAVGIGAVFLGFLGAAGSTMGAASMTLTVQARNLLSGIVQQQSNCLRAPECQQHLLKLTVWGIKQLQARVLAVERYLRDQQLLGIWGCSGKLICCTNVPWNSSWSNRNLSEIWDNMTWLQWDKEISNYTQIIYGLLEESQNQQEKNEQDLLALD

SEQ ID NO: 223 - protein, 655 aa, synthetic construct
MPMGSLQPLATLYLLGMLVASVLAAENLWVTVYYGVPVWKEAKTTLFCASDAKAYKKEVHNVWATHACVPTDPSPQELFLENVTENFNMWKNDMVDQMHEDIISLWDQSLKPCVKLTPLCVTLICSTATVNNRAVDEMKNCSFNTTTEIRDKKKKEYALFYRSDVVPLDETNNTSEYRLINCNTSACTQACPKVTFEPIPIHYCAPAGYAILKCNDETFNGTGPCSNVSTVQCTHGIRPVVSTQLLLNGSLAEKEIVIRSENLTNNAKIIIVHLHTPVEIVCTRPNNNTRKSVRIGPGQTFYATGDIIGDIKQAHCNISEEKWNETLQKVGIELQKHFPNKTIKYNQSAGGDMEITTHSFNCGGEFFYCNTSKLFNSTYNGTYISTNSTNSTSYITLQCRIKQIINMWQGVGRCMYAPPIAGNITCRSNITGLLLTRDGGINNVSNETETFRPAGGDMRDNWRSELYKYKVVKIEPLGVAPTRCKRRVVGRRRRRRAVGIGAVFLGFLGAAGSTMGAASMTLTVQARNLLSGIVQQQSNLLRAPEAQQHLLKLTVWGIKQLQARVLAVERYLRDQQLLGIWGCSGKLICCTNVPWNSSWSNRNLSEIWDNMTWLQWDKEISNYTQIIYGLLEESQNQQEKNEQDLLALDLPSTGG

SEQ ID NO: 224 - DNA, 1989 bp, synthetic construct
  source 1..1989: mol_type = other DNA
gtcgacgccaccatgcccatgggatctctgcaacctctggccacactgtacctgctgggaatgctggtggcttctgtgctggccgccgagaatctgtgggtcacagtgtactatggcgtgcccgtgtggaaagaggccaagaccacactgttctgtgccagcgacgccaaggcctacaagaaagaggtgcacaacgtctgggccacacacgcctgtgtgcctaccgatccatctcctcaagagctgttcctggaaaacgtgaccgagaacttcaacatgtggaagaacgacatggtggaccagatgcacgaggacatcatcagcctgtgggaccagagcctgaagccttgcgtgaagctgacccctctgtgcgtgaccctgatctgtagcaccgccaccgtgaacaacagagccgtggacgagatgaagaactgcagcttcaacaccaccaccgagatccgggacaagaagaagaaagagtacgccctgttctatcggagcgacgtggtgcccctggacgagacaaacaacaccagcgagtaccggctgatcaactgcaacacctccgcctgcactcaggcctgtcctaaagtgaccttcgagcccattcctatccactactgtgcccctgccggctacgccatcctgaagtgcaacgacgagacattcaacggcacaggcccctgcagcaatgtgtccaccgtgcagtgtacccacggcatcagaccagtggtgtctacccagctgctgctgaatggaagcctggccgagaaagaaatcgtgatcagaagcgagaacctgaccaacaacgccaagatcatcattgtgcatctgcacacccctgtggaaatcgtgtgcacccggcctaacaacaacacccggaagtctgtgcggatcggccctggccagacattctatgccaccggcgatatcatcggcgacatcaagcaggcccactgcaacatcagcgaggaaaagtggaacgagacactgcagaaagtgggcatcgagctgcagaagcacttccccaacaagaccatcaagtacaaccagagcgctggcggcgacatggaaatcaccacacacagcttcaattgtggcggcgagttcttctactgcaataccagcaagctgttcaacagcacctacaacggcacctatatcagcaccaactccaccaatagcaccagctacatcaccctgcagtgccggatcaagcagatcatcaatatgtggcaaggcgtcggccggtgtatgtacgcccctcctatcgccggcaacatcacctgtcggagcaatatcacaggcctgctgctcaccagagatggcggcatcaacaacgtgtccaacgagacagaaaccttccggcctgccggcggagacatgagagacaattggagaagcgagctgtacaagtacaaggtggtcaagatcgagcccctgggcgtcgcaccaacacggtgcaagagaagagtcgtgggccgtcgtagaaggcggagagccgttggaattggcgccgtgttcctgggctttctgggagccgctggatctacaatgggcgctgccagcatgaccctgacagtgcaggctagaaatctgctgagcggcatcgtgcagcagcagagcaatctgctcagagcccctgaggctcagcagcacctcctgaaactgacagtgtggggaatcaagcagctgcaggccagagtgctggcagtggaaagatacctgagggaccagcagctcctcggaatctggggatgtagcggcaagctgatctgctgcaccaacgtgccctggaactccagctggtccaaccggaatctgagcgagatctgggataacatgacctggctgcagtgggacaaagagatcagcaactacacccagatcatctacggcctgctggaagagagccagaaccagcaagagaaaaacgagcaggacctgctggccctggacctgcctagcaccggaggatgataaggatcc

SEQ ID NO: 225 - DNA, 2445 bp, synthetic construct
  source 1..2445: mol_type = other DNA
gtcgacgccaccatgcctatgggatctctgcagcctctggccacactgtacctgctgggaatgctggtggctagcgtgctggccaagggaaagctgtgggtcacagtgtactacggcgtgcccgtgtggaaagaggccaagaccacactgttctgcgcctccgatgccagagcctacgagaaagaggtgcacaacgtctgggccacacacgcctgtgtgcctaccgatccatctcctcaagagctggtgctgggcaacgtgaccgagaacttcaacatgtggaagaacgacatggtggaccagatgcacgaggacatcatcagcctgtgggaccagagcctgaagccttgcgtgaagctgacccctctgtgcgtgaccctgatctgttctgacgccaccgtgaaaaccggcaccgtggaagagatgaagaactgcagcttcaacaccaccaccgagatccgggacaagaagaagaaagagtacgccctgttctacaagcccgacatcgtgcccctgagcgagacaaacaacaccagcgagtaccggctgatcaactgcaacacctccgcctgcactcaggcctgtcctaaagtgaccttcgagcccattcctatccactactgtgcccctgccggctacgccatcctgaagtgcaacaacgagacattcaacggcacaggcccctgcagcaatgtgtccaccgtgcagtgtacccacggcatcagaccagtggtgtctacccagctgctgctgaatggaagcctggccgagaaagaaatcgtgatcagaagcgagaacctgaccaacaacgccaagatcatcatcgtccacctgaataccagcgtggaaatcgtgtgcacccggcctaacaacaacacccggaagtctgtgcggatcggccctggccagacattctatgccaccggcgatatcatcggcgacatcagacaggcccactgtaacatcagcgaggaaaagtggaacgacaccctgcagaaagtgggcatcgagctgcagaagcacttccccaacaagaccatcaagtacaaccagagcgctggcggcgacatggaaatcaccacacacagcttcaattgtggcggcgagttcttctactgcaataccagcaacctgttcaacgggacctacaatggcacctacatcagcaccaacagcagcgccaactccaccagcaccatcactctgcagtgccggatcaagcagatcatcaatatgtggcaaggcgtcggccggtgtatgtacgcccctcctatcgccggcaacatcacctgtcggagcaatatcacaggcctgctgctcaccagagatggcggcaccaatagcaacgaaaccgaaaccttcagacctgccggcggagacatgagagacaattggagaagcgagctgtacaagtacaaggtggtggaaatccagccactgggaatcgccccaacaggctgcaagagaagagtggttgaaggcggcggaggatctggcggaggcggatctgcagttggaatcggagctgtgttcctgggctttctgggagccgccggatctacaatgggagctgccagcatgaccctgaccgtgcaggctagaaatctgctgagcggcaaccccgactggctgcctgatatgacagtgtggggcatcaagcagctgcaggccagagtgctggccgtggaaagatacctgagagatcagcagctcctcggaatctggggctgtagcggcaagctgatctgctgcaccaacgtgccctggaacagctcctggtccaacagaaacctgtccgagatctgggataacatgacctggctgcagtgggacaaagagatctccaactacacccagatcatctacggcctgctggaagagagccagaaccagcaagagaaaaacgagcaggacctgctggccctggatggcggaggaagcggagatatcatcaagctgctgaacgagcaagtgaacaaagaaatgaactcctccaacctgtacatgagcatgagcagctggtgttacacccacagccttgatggcgccggactgttcctgtttgatcacgccgccgaggaatacgagcacgccaagaagctgatcatcttcctgaacgagaacaatgtgcccgtgcagctgaccagcattagcgccccagagcacaagttcgagggcctgacacagatctttcagaaggcctacgaacacgagcagcacatctccgagagcatcaacaacatcgtggaccacgccattaagagcaaggatcacgccaccttcaattttctgcagtggtacgtggccgaacagcacgaggaagaagtgctgttcaaggacatcctggacaagatcgagctgatcggcaacgagaaccacggcctgtatctggccgaccagtacgtgaagggcattgccaagagccggaagtcctgatgaggatcc

SEQ ID NO: 226 - DNA, 2472 bp, synthetic construct
  source 1..2472: mol_type = other DNA
gtcgacgccaccatgcctatgggatctctgcagcctctggccacactgtacctgctgggaatgctggtggcttctgtgctggccgccgagaatctgtgggtcacagtgtactatggcgtgcccgtgtggaaagaggcctgcaccacactgttttgcgcctccgatgccagagcctacgagaagaaagtgcacaacgtgtgggccacacactgctgcgtgccaaccgatccatctcctcaagagctggtgctgggcaacgtgaccgagaacttcaacatgtggaagaacgacatggtggaccagatgcacgaggacatcatcagcctgtgggaccagagcctgaagccttgcgtgaagctgacccctctgtgcgtgaccctgatctgttctgacgccaccgtgaaaaccggcaccgtggaagagatgaagaactgcagcttcaacaccaccaccgagatccgggacaagaagaagaaagagtacgccctgttctacaagcccgacatcgtgcccctgagcgagacaaacaacaccagcgagtaccggctgatcaactgcaacacctccgcctgcacacaggcttgccccaaagtgaccttcgagcccattcctatccactactgtgcccctgccggctacgccatcctgaagtgcaacaacgagacattcaacggcacaggcccctgcagcaatgtgtccaccgtgcagtgtacccacggcatcagaccagtggtgtctacccagctgctgctgaatggaagcctggccgagaaagaaatcgtgatcagaagcgagaacctgaccaacaacgccaagatcatcattgtgcacctgaataccagcgtcgagatcgtgtgcacccggcctaacaacaacacccggaagtctgtgcggatcggccctggccagtggttttatgccaccggcgatatcatcggcgacatcagacaggcccactgtaacatcagcgaggaaaagtggaacgacaccctgcagaaagtgggcatcgagctgcagaagcacttccccaacaagaccatcaagtacaaccagagcgctggcggcgacatggaaatcaccacacacagcttcaattgtggcggcgagttcttctactgcaataccagcaacctgttcaacgggacctacaatggcacctacatcagcaccaacagcagcgccaactccaccagcaccatcactctgcagtgccggatcaagcagatcatcaatatgtggcaaggcgtcggccggtgtatgtacgcccctcctatcgccggcaacatcacctgtcggagcaatatcacaggcctgctgctcaccagagatggcggcaccaatagcaacgaaaccgaaaccttcagacctgccggcggagacatgagagacaattggagaagcgagctgtacaagtacaaggtggtcaagatcgagcccctgggcgtcgcacctacacggtgcaagagaagagtcgtgggccgtcgtagaaggcggagagccgttggaattggcgccgtgttcctgggctttctgggagccgctggatctacaatgggcgctgccagcatgaccctgacagtgcaggctagaaatctgctgagcggcatcgtgcagcagcagagcaattgtctgagagcccctgagtgccagcagcatctgctgaaactgaccgtgtggggcatcaagcagctgcaggcaagagtgctggcagtggaaagatacctgcgggaccagcagctcctcggaatctggggatgtagcggcaagctgatctgctgcaccaacgtgccctggaacagctcctggtccaacagaaacctgtccgagatctgggataacatgacctggctgcagtgggacaaagagatcagcaactacacccagatcatctacggcctgctggaagagagccagaaccagcaagagaaaaacgagcaggacctgctggccctggatggcggaggatctggcgacattatcaagctgctgaacgagcaagtgaacaaagaaatgaactcctccaacctgtacatgagcatgagcagctggtgttacacccacagccttgatggcgccggactgttcctgtttgatcacgccgccgaggaatacgagcacgccaagaagctgatcatcttcctgaacgagaacaatgtgcccgtgcagctgaccagcattagcgccccagagcacaagttcgagggcctgacacagatctttcagaaggcctacgaacacgagcagcacatctccgagagcatcaacaacatcgtggaccacgccattaagagcaaggatcacgccaccttcaattttctgcagtggtacgtggccgaacagcacgaggaagaggtgctgttcaaggacatcctggacaagattgagctgatcggcaacgagaaccacggcctgtatctggccgaccagtacgtgaagggaatcgccaagagcagaaagagctgatgaggatcc

SEQ ID NO: 227 - DNA, 2472 bp, synthetic construct
  source 1..2472: mol_type = other DNA
gtcgacgccaccatgcctatgggatctctgcagcctctggccacactgtacctgctgggaatgctggtggcttctgtgctggccgccgagaatctgtgggtcacagtgtactatggcgtgcccgtgtggaaagaggccaagaccacactgttctgcgcctccgatgccagagcctacgagaaagaggtggccaacgtttgggccacacacgcctgtgtgcctaccgatccatctcctcaagagctggtgctgggcaacgtgaccgagaacttcaacatgtggaagaacgacatggtggaccagatgcacgaggacatcatcagcctgtgggaccagagcctgaagccttgcgtgaagctgacccctctgtgcgtgaccctgatctgttctgacgccaccgtgaaaaccggcaccgtggaagagatgaagaactgcagcttcaacaccaccaccgagatccgggacaagaagaagaaagagtacgccctgttctacaagcccgacatcgtgcccctgagcgagacaaacaacaccagcgagtaccggctgatcaactgcaacacctccgccgtgacacaggcttgccccaaagtgaccttcgagcccattcctatccactactgtgcccctgccggctacgccatcctgaagtgcaacaacgagacattcaacggcacaggcccctgcagcaatgtgtccaccgtgcagtgtacccacggcatcagaccagtggtgtctacccagctgctgctgaatggaagcctggccgagaaagaaatcgtgatcagaagcgagaacctgaccaacaacgccaagatcatcattgtgcacctgaataccagcgtcgagatcgtgtgcacccggcctaacaacaacacccggaagtctgtgcggatcggccctggccagacattctatgccaccggcgatatcatcggcgacatcagacaggcccactgtaacatcagcgaggaaaagtggaacgacaccctgcagaaagtgggcatcgagctgcagaagcacttccccaacaagaccatcaagtacaaccagagcgctggcggcgacatggaaatcaccacacacagcttcaattgtggcggcgagttcttctactgcaataccagcaacctgttcaacgggacctacaatggcacctacatcagcaccaacagcagcgccaactccaccagcaccatcactctgcagtgccggatcaagcagatcatcaatatgtggcaaggcgtgggcagagctatgtacgcccctcctatcgccggcaacatcacctgtcggagcaatatcacaggcctgctgctcaccagagatggcggcaccaatagcaacgaaaccgaaaccttcagacctgccggcggagacatgagagacaattggagaagcgagctgtacaagtacaaggtggtcaagatcgagcccctgggcgtcgcacctacacggtgcaagagaagagtcgtgggacgtagacgaaggcggagagccgttggaatcggagccgtgttcctgggctttctgggagccgctggatctacaatgggcgctgccagcatgaccctgacagtgcaggctagaaatctgctgagcggcatcgtgcagcagcagagcaatctgctcagagcccctgaggctcagcagcacctcctgaaactgacagtgtggggcatcaagcagctgcaggccagagtgctgacagtggaaagatacgccagggaccagcagctcctcggaatctggggatgtagcggcaagctgatctgctgcaccaacgtgccctggaacagctcctggtccaacagaaacctgtccgagatctgggataacatgacctggctgcagtgggacaaagagatcagcaactacacccagatcatctacggcctgctggaagagagccagaaccagcaagagaaaaacgagcaggacctgctggctctggatggcggaggaagcggagatatcatcaagctgctgaacgagcaagtgaacaaagaaatgaactcctccaacctgtacatgagcatgagcagctggtgttacacccacagccttgatggcgccggactgttcctgtttgatcacgccgccgaggaatacgagcacgccaagaagctgatcatcttcctgaacgagaacaatgtgcccgtgcagctgaccagcattagcgccccagagcacaagttcgagggcctgacacagatctttcagaaggcctacgaacacgagcagcacatctccgagagcatcaacaacatcgtggaccacgccattaagagcaaggatcacgccaccttcaattttctgcagtggtacgtggccgaacagcacgaggaagaagtgctgttcaaggacatcctggacaagattgagctgatcggcaacgagaaccacggcctgtatctggccgaccagtacgtgaagggaatcgccaagagccggaagtcctgatgaggatcc

SEQ ID NO: 228 - DNA, 2472 bp, synthetic construct
  source 1..2472: mol_type = other DNA
gtcgacgccaccatgcctatgggatctctgcagcctctggccacactgtacctgctgggaatgctggtggcttctgtgctggccgccgagaatctgtgggtcacagtgtactatggcgtgcccgtgtggaaagaggccaagaccacactgttctgcgcctccgatgccagagcctacgagaaagaggtgcacaacatctgggccacacacgcctgcgtgccaaccgatccatctcctcaagaactggtgctgggcaacgtgaccgagaacttcaacatgtggaagaacgacatggtggaccagatgcacgaggacatcatcagcctgtgggaccagagcctgaagccttgcgtgaagctgacccctctgtgcgtgaccctgatctgttctgacgccaccgtgaaaaccggcaccgtggaagagatgaagaactgcagcttcaacaccaccaccgagatccgggacaagaagaagaaagagtacgccctgttctacaagcccgacatcgtgcccctgagcgagacaaacaacaccagcgagtaccggctgatcaactgcaacacctccgccgtgacacaagtgtgccccaagctgaccttcgagcccattcctatccactactgtgcccctgccggctacgccatcctgaagtgcaacaacgagacattcaacggcacaggcccctgcagcaatgtgtccaccgtgcagtgtacccacggcatcagacctgtgctgagcacacagctgctgctgaatggaagcctggccgagaaagaaatcgtgatcagaagcgagaacctgaccaacaacgccaagatcatcatcgtccacctgaataccagcgtggaaatcgtgtgcacccggcctaacaacaacacccggaagtctgtgcggatcggccctggccagacattctatgccaccggcgatatcatcggcgacatcagacaggcccactgtaacatcagcgaggaaaagtggaacgacaccctgcagaaagtgggcatcgagctgcagaagcacttccccaacaagaccatcaagtacaaccagagcgctggcggcgacatggaaatcaccacacacagcttcaattgtggcggcgagttcttctactgcaataccagcaacctgttcaacgggacctacaatggcacctacatcagcaccaacagcagcgccaactccaccagcaccatcactctgcagtgccggatcaagcagatcatcaatatgtggcaaggcgtgggcagagctatgtacgcccctcctatcgccggcaacatcacctgtcggagcaatatcacaggcctgctgctcaccagagatggcggcaccaatagcaacgaaaccgaaaccttcagacctgccggcggagacatgagagacaattggagaagcgagctgtacaagtacaaggtggtcaagatcgagcccctgggcgtcgcacctacacggtgcaagagaagagtcgtgggacgtagacgaaggcggagagccgttggaatcggagccgtgttcctgggctttctgggagccgctggatctacaatgggcgctgccagcatgaccctgacagtgcaggctagaaatctgctgagcggcatcgtgcagcagcagagcaatctgctcagagcccctgaggctcagcagcacctcctgaaactgacagtgtggggcatcaagcagctgcaggcaagagtgctggcagtggaaagatacctgcgggaccagcagctcctcggaatctggggatgtagcggcaagctgatctgctgcaccaacgtgccctggaacagcagctggtccaacagaaacctgtccgagatctgggataacatgacctggctgcagtgggacaaagagatcagcaactacacccagatcatctacggcctgctggaagagagccagaaccagcaagagaaaaacgagcaggacctgctggccctggatggcggaggatctggcgacattatcaagctgctgaacgagcaagtgaacaaagaaatgaacagctccaacctgtacatgagcatgtccagctggtgctacacccacagtcttgatggcgccggactgttcctgtttgaccacgccgccgaggaatacgagcacgccaagaagctgatcatcttcctgaacgagaacaatgtgcccgtgcagctgaccagcattagcgccccagagcacaagttcgagggcctgacacagatctttcagaaggcctacgaacacgagcagcacatctccgagagcatcaacaacatcgtggaccacgccattaagagcaaggatcacgccaccttcaattttctgcagtggtacgtggccgaacagcacgaggaagaagtgctgttcaaggacatcctggacaagattgagctgatcggcaacgagaaccacggcctgtatctggccgaccagtacgtgaagggaatcgccaagagccggaagtcctgatgaggatcc

SEQ ID NO: 229 - DNA, 2472 bp, synthetic construct
  source 1..2472: mol_type = other DNA
gtcgacgccaccatgcctatgggatctctgcagcctctggccacactgtacctgctgggaatgctggtggcttctgtgctggccgccgagaatctgtgggtcacagtgtactatggcgtgcccgtgtggaaagaggccaagaccacactgttctgcgcctccgatgccagagcctacgagaaagaggtgcacaacatctgggccacacacgcctgcgtgccaaccgatccatctcctcaagaactggtgctgggcaacgtgaccgagaacttcaacatgtggaagaacgacatggtggaccagatgcacgaggacatcatcagcctgtgggaccagagcctgaagccttgcgtgaagctgacccctctgtgcgtgaccctgatctgttctgacgccaccgtgaaaaccggcaccgtggaagagatgaagaactgcagcttcaacaccaccaccgagatccgggacaagaagaagaaagagtacgccctgttctacaagcccgacatcgtgcccctgagcgagacaaacaacaccagcgagtaccggctgatcaactgcaacacaagcgccgtgacaatggtctgccccaagctgaccttcgagcccattcctatccactactgtgcccctgccggctacgccatcctgaagtgcaacaacgagacattcaacggcacaggcccctgcagcaatgtgtccaccgtgcagtgtacccacggcatcagacctgtgctgagcacacagctgctgctgaatggaagcctggccgagaaagaaatcgtgatcagaagcgagaacctgaccaacaacgccaagatcatcatcgtccacctgaacacctccgtggaaatcgtgtgcacccggcctctgaatctgaccagaaagagcgtgcggatcggccctggccagaccttttatgccatgggcgacatcatcggcgacatccggcaggcccactgcaacatctctgaggaaaagtggaacgacaccctgcagaaagtgggcatcgagctgcagaagcacttccccaacaagaccatcaagtacaaccagagcgctggcggcgacatggaaatcaccacacacagcttcaattgtggcggcgagttcttctactgcaataccagcaacctgttcaacgggacctacaatggcacctacatcagcaccaacagcagcgccaactccaccagcaccatcactctgcagtgccggatcaagatgatcattaacatgtggcaaggcgtcggcagggctatgtacgcccctcctatcgccggcaacatcacctgtcggagcaatatcacaggcctgctgctcaccagagatggcggcaccaatagcaacgaaaccgaaaccttcagacctgccggcggagacatgagagacaattggagaagcgagctgtacaagtacaaggtggtcaagatcgagcccctgggcgtcgcacctacacggtgcaagagaagagtcgtgggccgtcgtagaaggcggagagccgttggaattggcgccgtgttcctgggctttctgggagccgctggatctacaatgggcgctgccagcatgaccctgacagtgcaggctagaaatctgctgagcggcatcgtgcagcagcagagcaatctgctcagagcccctgaggctcagcagcacctcctgaaactgacagtgtggggcatcaagcagctgcaggcaagagtgctggcagtggaaagatacctgcgggaccagcagctcctcggaatctggggatgtagcggcaagctgatctgctgcaccaacgtgccctggaacagcagctggtccaacagaaacctgtccgagatctgggataacatgacctggctgcagtgggacaaagagatcagcaactacacccagatcatctacggcctgctggaagagagccagaaccagcaagagaaaaacgagcaggacctgctggccctggatggcggaggatctggcgatatcatcaagctgctgaacgagcaagtgaacaaagaaatgaacagctccaacctgtacatgagcatgtccagctggtgctacacccacagtcttgatggcgccggactgttcctgtttgaccacgccgccgaggaatacgagcacgccaagaagctgatcattttcctgaacgagaacaacgtgccagtgcagctgaccagcattagcgccccagagcacaagttcgagggcctgacacagatctttcagaaggcctacgaacacgagcagcacatcagcgagagcatcaacaacatcgtggaccacgccattaagagcaaggatcacgccaccttcaattttctgcagtggtacgtggccgaacagcacgaggaagaagtgctgttcaaggacatcctggacaagattgagctgatcggcaacgagaaccacggcctgtatctggccgaccagtacgtgaagggaatcgccaagagccggaagtcctgatgaggatcc

SEQ ID NO: 230 - DNA, 2478 bp, synthetic construct
  source 1..2478: mol_type = other DNA
gtcgacgccaccatgcctatgggatctctgcagcctctggccacactgtacctgctgggaatgctggtggcttctgtgctggccgccgagaatctgtgggtcacagtgtactatggcgtgcccgtgtggaaagaggccaagaccacactgttctgcgcctccgatgccagagcctacgagaaagaggtgcacaacgtctgggccacacacgcctgtgtgcctaccgatccatctcctcaagagctggtgctgggcaacgtgaccgagaacttcaacatgtggaagaacgacatggtggaccagatgcacgaggacatcatcagcctgtggtgccagtctctgaagccctgcgtgaagctgacccctctgtgtgtgaccctgatctgctctgacgccaccgtgaaaaccggcaccgtggaagagatgaagaactgcagcttcaacaccaccaccgagatccgggacaagaagaagaaagagtacgccctgttctacaagcccgacatcgtgcccctgagcgagacaaacaacaccagcgagtaccggctgatcaactgcaacacctccgccgtgacacaggcttgccccaaagtgaccttcgagcccattcctatccactactgtgcccctgccggctacgccatcctgaagtgcaacaacgagacattcaacggcacaggcccctgcagcaatgtgtccaccgtgcagtgtacccacggcatcagaccagtggtgtctacccagctgctgctgaatggaagcctggccgagaaagaaatcgtgatcagaagcgagaacctgaccaacaacgccaagatcatcatcgtccacctgaataccagcgtggaaatcgtgtgcacccggcctaacaacaacacccggaagtctgtgcggatcggccctggccagacattctatgccaccggcgatatcatcggcgacatcagacaggcccactgtaacatcagcgaggaaaagtggaacgacaccctgcagaaagtgggcatcgagctgcagaagcacttccccaacaagaccatcaagtacaaccagagcgctggcggcgacatggaaatcaccacacacagcttcaattgtggcggcgagttcttctactgcaataccagcaacctgttcaacgggacctacaatggcacctacatcagcaccaacagcagcgccaactccaccagcaccatcactctgcagtgccggatcaagcagatcatcaatatgtggcaaggctgcggcgtgggcagagctatgtatgcccctcctatcgccggcaacatcacctgtcggagcaatatcacaggcctgctgctcaccagagatggcggcaccaatagcaacgaaaccgaaaccttcagacctgccggcggagacatgagagacaattggagaagcgagctgtacaagtacaaggtggtcaagatcgagcccctgggcgtcgcacctacacggtgcaagagaagagtcgtgggacgtagacgaaggcggagagccgttggaatcggagccgtgttcctgggctttctgggagccgctggatctacaatgggcgctgccagcatgaccctgacagtgcaggctagaaatctgctgagcggcatcgtgcagcagcagagcaatctgctcagagcccctgaggctcagcagcacctcctgaaactgacagtgtggggcatcaagcagctgcaggcaagagtgctggcagtggaaagatacctgcgggaccagcagctcctcggaatctggggatgtagcggcaagctgatctgttgcaccaacgtgccctggaacagctcctggtccaacagaaacctgtccgagatctgggataacatgacctggctgcagtgggacaaagagatcagcaactacacccagatcatctacggcctgctggaagagagccagaaccagcaagagaaaaacgagcaggacctgctggccctggatggcggaggatctggcgacattatcaagctgctgaacgagcaagtgaacaaagaaatgaactcctccaacctgtacatgagcatgagcagctggtgttacacccacagccttgatggcgccggactgttcctgtttgatcacgccgccgaggaatacgagcacgccaagaagctgatcatcttcctgaacgagaacaatgtgcccgtgcagctgaccagcattagcgccccagagcacaagttcgagggcctgacacagatctttcagaaggcctacgaacacgagcagcacatctccgagagcatcaacaacatcgtggaccacgccattaagagcaaggatcacgccaccttcaattttctgcagtggtacgtggccgaacagcacgaggaagaagtgctgttcaaggacatcctggacaagattgagctgatcggcaacgagaaccacggcctgtatctggccgaccagtacgtgaagggaatcgccaagagccggaagtcctgatgaggatcc

SEQ ID NO: 231 - DNA, 2472 bp, synthetic construct
  source 1..2472: mol_type = other DNA
gtcgacgccaccatgcctatgggatctctgcagcctctggccacactgtacctgctgggaatgctggtggcttctgtgctggccgccgagaatctgtgggtcacagtgtactatggcgtgcccgtgtggaaagaggccaagaccacactgttctgcgcctccgatgccagagcctacgagaaagaggtgcacaacgtctgggccacacacgcctgtgtgcctaccgatccatctcctcaagagctggtgctgggcaacgtgaccgagaacttcaacatgtggaagaacgacatggtggaccagatgcacgaggacatcatcagcctgtgggaccagagcctgaagccttgcgtgaagctgacccctctgtgcgtgaccctgatctgttctgacgccaccgtgaaaaccggcaccgtggaagagatgaagaactgcagcttcaacaccaccaccgagatccgggacaagaagaagaaagagtacgccctgttctacaagcccgacatcgtgcccctgagcgagacaaacaacaccagcgagtaccggctgatcaactgcaacacctccgcctgcactcaggcctgtcctaaagtgaccttcgagcccattcctatccactactgtgcccctgccggctacgccatcctgaagtgcaacaacgagacattcaacggcacaggcccctgcagcaatgtgtccaccgtgcagtgtacccacggcatcagaccagtggtgtctacccagctgctgctgaatggaagcctggccgagaaagaaatcgtgatcagaagcgagaacctgaccaacaacgccaagatcatcatcgtccacctgaataccagcgtggaaatcgtgtgcacccggcctaacaacaacacccggaagtctgtgcggatcggccctggccagacattctatgccaccggcgatatcatcggcgacatcagacaggcccactgtaacatcagcgaggaaaagtggaacgacaccctgcagaaagtgggcatcgagctgcagaagcacttccccaacaagaccatcaagtacaaccagagcgctggcggcgacatggaaatcaccacacacagcttcaattgtggcggcgagttcttctactgcaataccagcaacctgttcaacgggacctacaatggcacctacatcagcaccaacagcagcgccaactccaccagcaccatcactctgcagtgccggatcaagcagatcatcaatatgtggcaaggcgtcggccggtgtatgtacgcccctcctatcgccggcaacatcacctgtcggagcaatatcacaggcctgctgctcaccagagatggcggcaccaatagcaacgaaaccgaaaccttcagacctgccggcggagacatgagagacaattggagaagcgagctgtacaagtacaaggtggtcaagatcgagcccctgggcgtcgcacctacacggtgcaagagaagagtcgtgggccgtcgtagaaggcggagagccgttggaattggcgccgtgttcctgggctttctgggagccgctggatctacaatgggcgctgccagcatgaccctgacagtgcaggctagaaatctgctgagcggcatcgtgcagcagcagagcaatctgctcagagcccctgaggctcagcagcacctcctgaaactgacagtgtggggcatcaagcagctgcaggcaagagtgctggcagtggaaagatacctgcgggaccagcagctcctcggaatctggggatgtagcggcaagctgatctgctgcaccaacgtgccctggaacagctcctggtccaacagaaacctgtccgagatctgggataacatgacctggctgcagtgggacaaagagatcagcaactacacccagatcatctacggcctgctggaagagagccagaaccagcaagagaaaaacgagcaggacctgctggccctggatggcggaggatctggcgacattatcaagctgctgaacgagcaagtgaacaaagaaatgaactcctccaacctgtacatgagcatgagcagctggtgttacacccacagccttgatggcgccggactgttcctgtttgatcacgccgccgaggaatacgagcacgccaagaagctgatcatcttcctgaacgagaacaatgtgcccgtgcagctgaccagcattagcgccccagagcacaagttcgagggcctgacacagatctttcagaaggcctacgaacacgagcagcacatctccgagagcatcaacaacatcgtggaccacgccattaagagcaaggatcacgccaccttcaattttctgcagtggtacgtggccgaacagcacgaggaagaagtgctgttcaaggacatcctggacaagattgagctgatcggcaacgagaaccacggcctgtatctggccgaccagtacgtgaagggaatcgccaagagccggaagtcctgatgaggatcc

SEQ ID NO: 232 - protein, 807 aa, synthetic construct
MPMGSLQPLATLYLLGMLVASVLAKGKLWVTVYYGVPVWKEAKTTLFCASDARAYEKEVHNVWATHACVPTDPSPQELVLGNVTENFNMWKNDMVDQMHEDIISLWDQSLKPCVKLTPLCVTLICSDATVKTGTVEEMKNCSFNTTTEIRDKKKKEYALFYKPDIVPLSETNNTSEYRLINCNTSACTQACPKVTFEPIPIHYCAPAGYAILKCNNETFNGTGPCSNVSTVQCTHGIRPVVSTQLLLNGSLAEKEIVIRSENLTNNAKIIIVHLNTSVEIVCTRPNNNTRKSVRIGPGQTFYATGDIIGDIRQAHCNISEEKWNDTLQKVGIELQKHFPNKTIKYNQSAGGDMEITTHSFNCGGEFFYCNTSNLFNGTYNGTYISTNSSANSTSTITLQCRIKQIINMWQGVGRCMYAPPIAGNITCRSNITGLLLTRDGGTNSNETETFRPAGGDMRDNWRSELYKYKVVEIQPLGIAPTGCKRRVVEGGGGSGGGGSAVGIGAVFLGFLGAAGSTMGAASMTLTVQARNLLSGNPDWLPDMTVWGIKQLQARVLAVERYLRDQQLLGIWGCSGKLICCTNVPWNSSWSNRNLSEIWDNMTWLQWDKEISNYTQIIYGLLEESQNQQEKNEQDLLALDGGGSGDIIKLLNEQVNKEMNSSNLYMSMSSWCYTHSLDGAGLFLFDHAAEEYEHAKKLIIFLNENNVPVQLTSISAPEHKFEGLTQIFQKAYEHEQHISESINNIVDHAIKSKDHATFNFLQWYVAEQHEEEVLFKDILDKIELIGNENHGLYLADQYVKGIAKSRKS

SEQ ID NO: 233 - protein, 816 aa, synthetic construct
MPMGSLQPLATLYLLGMLVASVLAAENLWVTVYYGVPVWKEACTTLFCASDARAYEKKVHNVWATHCCVPTDPSPQELVLGNVTENFNMWKNDMVDQMHEDIISLWDQSLKPCVKLTPLCVTLICSDATVKTGTVEEMKNCSFNTTTEIRDKKKKEYALFYKPDIVPLSETNNTSEYRLINCNTSACTQACPKVTFEPIPIHYCAPAGYAILKCNNETFNGTGPCSNVSTVQCTHGIRPVVSTQLLLNGSLAEKEIVIRSENLTNNAKIIIVHLNTSVEIVCTRPNNNTRKSVRIGPGQWFYATGDIIGDIRQAHCNISEEKWNDTLQKVGIELQKHFPNKTIKYNQSAGGDMEITTHSFNCGGEFFYCNTSNLFNGTYNGTYISTNSSANSTSTITLQCRIKQIINMWQGVGRCMYAPPIAGNITCRSNITGLLLTRDGGTNSNETETFRPAGGDMRDNWRSELYKYKVVKIEPLGVAPTRCKRRVVGRRRRRRAVGIGAVFLGFLGAAGSTMGAASMTLTVQARNLLSGIVQQQSNCLRAPECQQHLLKLTVWGIKQLQARVLAVERYLRDQQLLGIWGCSGKLICCTNVPWNSSWSNRNLSEIWDNMTWLQWDKEISNYTQIIYGLLEESQNQQEKNEQDLLALDGGGSGDIIKLLNEQVNKEMNSSNLYMSMSSWCYTHSLDGAGLFLFDHAAEEYEHAKKLIIFLNENNVPVQLTSISAPEHKFEGLTQIFQKAYEHEQHISESINNIVDHAIKSKDHATFNFLQWYVAEQHEEEVLFKDILDKIELIGNENHGLYLADQYVKGIAKSRKS

SEQ ID NO: 234 - protein, 816 aa, synthetic construct
MPMGSLQPLATLYLLGMLVASVLAAENLWVTVYYGVPVWKEAKTTLFCASDARAYEKEVANVWATHACVPTDPSPQELVLGNVTENFNMWKNDMVDQMHEDIISLWDQSLKPCVKLTPLCVTLICSDATVKTGTVEEMKNCSFNTTTEIRDKKKKEYALFYKPDIVPLSETNNTSEYRLINCNTSAVTQACPKVTFEPIPIHYCAPAGYAILKCNNETFNGTGPCSNVSTVQCTHGIRPVVSTQLLLNGSLAEKEIVIRSENLTNNAKIIIVHLNTSVEIVCTRPNNNTRKSVRIGPGQTFYATGDIIGDIRQAHCNISEEKWNDTLQKVGIELQKHFPNKTIKYNQSAGGDMEITTHSFNCGGEFFYCNTSNLFNGTYNGTYISTNSSANSTSTITLQCRIKQIINMWQGVGRAMYAPPIAGNITCRSNITGLLLTRDGGTNSNETETFRPAGGDMRDNWRSELYKYKVVKIEPLGVAPTRCKRRVVGRRRRRRAVGIGAVFLGFLGAAGSTMGAASMTLTVQARNLLSGIVQQQSNLLRAPEAQQHLLKLTVWGIKQLQARVLTVERYARDQQLLGIWGCSGKLICCTNVPWNSSWSNRNLSEIWDNMTWLQWDKEISNYTQIIYGLLEESQNQQEKNEQDLLALDGGGSGDIIKLLNEQVNKEMNSSNLYMSMSSWCYTHSLDGAGLFLFDHAAEEYEHAKKLIIFLNENNVPVQLTSISAPEHKFEGLTQIFQKAYEHEQHISESINNIVDHAIKSKDHATFNFLQWYVAEQHEEEVLFKDILDKIELIGNENHGLYLADQYVKGIAKSRKS

SEQ ID NO: 235 - protein, 816 aa, synthetic construct
MPMGSLQPLATLYLLGMLVASVLAAENLWVTVYYGVPVWKEAKTTLFCASDARAYEKEVHNIWATHACVPTDPSPQELVLGNVTENFNMWKNDMVDQMHEDIISLWDQSLKPCVKLTPLCVTLICSDATVKTGTVEEMKNCSFNTTTEIRDKKKKEYALFYKPDIVPLSETNNTSEYRLINCNTSAVTQVCPKLTFEPIPIHYCAPAGYAILKCNNETFNGTGPCSNVSTVQCTHGIRPVLSTQLLLNGSLAEKEIVIRSENLTNNAKIIIVHLNTSVEIVCTRPNNNTRKSVRIGPGQTFYATGDIIGDIRQAHCNISEEKWNDTLQKVGIELQKHFPNKTIKYNQSAGGDMEITTHSFNCGGEFFYCNTSNLFNGTYNGTYISTNSSANSTSTITLQCRIKQIINMWQGVGRAMYAPPIAGNITCRSNITGLLLTRDGGTNSNETETFRPAGGDMRDNWRSELYKYKVVKIEPLGVAPTRCKRRVVGRRRRRRAVGIGAVFLGFLGAAGSTMGAASMTLTVQARNLLSGIVQQQSNLLRAPEAQQHLLKLTVWGIKQLQARVLAVERYLRDQQLLGIWGCSGKLICCTNVPWNSSWSNRNLSEIWDNMTWLQWDKEISNYTQIIYGLLEESQNQQEKNEQDLLALDGGGSGDIIKLLNEQVNKEMNSSNLYMSMSSWCYTHSLDGAGLFLFDHAAEEYEHAKKLIIFLNENNVPVQLTSISAPEHKFEGLTQIFQKAYEHEQHISESINNIVDHAIKSKDHATFNFLQWYVAEQHEEEVLFKDILDKIELIGNENHGLYLADQYVKGIAKSRKS

SEQ ID NO: 236 - protein, 816 aa, synthetic construct
MPMGSLQPLATLYLLGMLVASVLAAENLWVTVYYGVPVWKEAKTTLFCASDARAYEKEVHNIWATHACVPTDPSPQELVLGNVTENFNMWKNDMVDQMHEDIISLWDQSLKPCVKLTPLCVTLICSDATVKTGTVEEMKNCSFNTTTEIRDKKKKEYALFYKPDIVPLSETNNTSEYRLINCNTSAVTMVCPKLTFEPIPIHYCAPAGYAILKCNNETFNGTGPCSNVSTVQCTHGIRPVLSTQLLLNGSLAEKEIVIRSENLTNNAKIIIVHLNTSVEIVCTRPLNLTRKSVRIGPGQTFYAMGDIIGDIRQAHCNISEEKWNDTLQKVGIELQKHFPNKTIKYNQSAGGDMEITTHSFNCGGEFFYCNTSNLFNGTYNGTYISTNSSANSTSTITLQCRIKMIINMWQGVGRAMYAPPIAGNITCRSNITGLLLTRDGGTNSNETETFRPAGGDMRDNWRSELYKYKVVKIEPLGVAPTRCKRRVVGRRRRRRAVGIGAVFLGFLGAAGSTMGAASMTLTVQARNLLSGIVQQQSNLLRAPEAQQHLLKLTVWGIKQLQARVLAVERYLRDQQLLGIWGCSGKLICCTNVPWNSSWSNRNLSEIWDNMTWLQWDKEISNYTQIIYGLLEESQNQQEKNEQDLLALDGGGSGDIIKLLNEQVNKEMNSSNLYMSMSSWCYTHSLDGAGLFLFDHAAEEYEHAKKLIIFLNENNVPVQLTSISAPEHKFEGLTQIFQKAYEHEQHISESINNIVDHAIKSKDHATFNFLQWYVAEQHEEEVLFKDILDKIELIGNENHGLYLADQYVKGIAKSRKS

SEQ ID NO: 237 - protein, 818 aa, synthetic construct
MPMGSLQPLATLYLLGMLVASVLAAENLWVTVYYGVPVWKEAKTTLFCASDARAYEKEVHNVWATHACVPTDPSPQELVLGNVTENFNMWKNDMVDQMHEDIISLWCQSLKPCVKLTPLCVTLICSDATVKTGTVEEMKNCSFNTTTEIRDKKKKEYALFYKPDIVPLSETNNTSEYRLINCNTSAVTQACPKVTFEPIPIHYCAPAGYAILKCNNETFNGTGPCSNVSTVQCTHGIRPVVSTQLLLNGSLAEKEIVIRSENLTNNAKIIIVHLNTSVEIVCTRPNNNTRKSVRIGPGQTFYATGDIIGDIRQAHCNISEEKWNDTLQKVGIELQKHFPNKTIKYNQSAGGDMEITTHSFNCGGEFFYCNTSNLFNGTYNGTYISTNSSANSTSTITLQCRIKQIINMWQGCGVGRAMYAPPIAGNITCRSNITGLLLTRDGGTNSNETETFRPAGGDMRDNWRSELYKYKVVKIEPLGVAPTRCKRRVVGRRRRRRAVGIGAVFLGFLGAAGSTMGAASMTLTVQARNLLSGIVQQQSNLLRAPEAQQHLLKLTVWGIKQLQARVLAVERYLRDQQLLGIWGCSGKLICCTNVPWNSSWSNRNLSEIWDNMTWLQWDKEISNYTQIIYGLLEESQNQQEKNEQDLLALDGGGSGDIIKLLNEQVNKEMNSSNLYMSMSSWCYTHSLDGAGLFLFDHAAEEYEHAKKLIIFLNENNVPVQLTSISAPEHKFEGLTQIFQKAYEHEQHISESINNIVDHAIKSKDHATFNFLQWYVAEQHEEEVLFKDILDKIELIGNENHGLYLADQYVKGIAKSRKS

SEQ ID NO: 238 - protein, 816 aa, synthetic construct
MPMGSLQPLATLYLLGMLVASVLAAENLWVTVYYGVPVWKEAKTTLFCASDARAYEKEVHNVWATHACVPTDPSPQELVLGNVTENFNMWKNDMVDQMHEDIISLWDQSLKPCVKLTPLCVTLICSDATVKTGTVEEMKNCSFNTTTEIRDKKKKEYALFYKPDIVPLSETNNTSEYRLINCNTSACTQACPKVTFEPIPIHYCAPAGYAILKCNNETFNGTGPCSNVSTVQCTHGIRPVVSTQLLLNGSLAEKEIVIRSENLTNNAKIIIVHLNTSVEIVCTRPNNNTRKSVRIGPGQTFYATGDIIGDIRQAHCNISEEKWNDTLQKVGIELQKHFPNKTIKYNQSAGGDMEITTHSFNCGGEFFYCNTSNLFNGTYNGTYISTNSSANSTSTITLQCRIKQIINMWQGVGRCMYAPPIAGNITCRSNITGLLLTRDGGTNSNETETFRPAGGDMRDNWRSELYKYKVVKIEPLGVAPTRCKRRVVGRRRRRRAVGIGAVFLGFLGAAGSTMGAASMTLTVQARNLLSGIVQQQSNLLRAPEAQQHLLKLTVWGIKQLQARVLAVERYLRDQQLLGIWGCSGKLICCTNVPWNSSWSNRNLSEIWDNMTWLQWDKEISNYTQIIYGLLEESQNQQEKNEQDLLALDGGGSGDIIKLLNEQVNKEMNSSNLYMSMSSWCYTHSLDGAGLFLFDHAAEEYEHAKKLIIFLNENNVPVQLTSISAPEHKFEGLTQIFQKAYEHEQHISESINNIVDHAIKSKDHATFNFLQWYVAEQHEEEVLFKDILDKIELIGNENHGLYLADQYVKGIAKSRKS

SEQ ID NO: 239 - DNA, 2532 bp, synthetic construct
  source 1..2532: mol_type = other DNA
gtcgacgccaccatgcctatgggatctctgcagcctctggccacactgtacctgctgggaatgctggtggcttctgtgctggccgccgagaatctgtgggtcacagtgtactatggcgtgcccgtgtggaaagaggccaagaccacactgttctgcgcctccgatgccagagcctacgagaaagaggtgcacaacgtctgggccacacacgcctgtgtgcctaccgatccatctcctcaagagctggtgctgggcaacgtgaccgagaacttcaacatgtggaagaacgacatggtggaccagatgcacgaggacatcatcagcctgtgggaccagagcctgaagccttgcgtgaagctgacccctctgtgcgtgaccctgatctgttctgacgccaccgtgaaaaccggcaccgtggaagagatgaagaactgcagcttcaacaccaccaccgagatccgggacaagaagaagaaagagtacgccctgttctacaagcccgacatcgtgcccctgagcgagacaaacaacaccagcgagtaccggctgatcaactgcaacacctccgcctgcactcaggcctgtcctaaagtgaccttcgagcccattcctatccactactgtgcccctgccggctacgccatcctgaagtgcaacaacgagacattcaacggcacaggcccctgcagcaatgtgtccaccgtgcagtgtacccacggcatcagaccagtggtgtctacccagctgctgctgaatggaagcctggccgagaaagaaatcgtgatcagaagcgagaacctgaccaacaacgccaagatcatcatcgtccacctgaataccagcgtggaaatcgtgtgcacccggcctaacaacaacacccggaagtctgtgcggatcggccctggccagacattctatgccaccggcgatatcatcggcgacatcaagcaggcccactgcaacatcagcgaggaaaagtggaacgacaccctgcagaaagtgggcatcgagctgcagaagcacttccccaacaagaccatcaagtacaaccagagcgctggcggcgacatggaaatcaccacacacagcttcaattgtggcggcgagttcttctactgcaataccagcaacctgttcaacgggacctacaatggcacctacatcagcaccaacagcagcgccaactccaccagcaccatcactctgcagtgccggatcaagcagatcatcaatatgtggcaaggcgtcggccggtgtatgtacgcccctcctatcgccggcaacatcacctgtcggagcaatatcacaggcctgctgctcaccagagatggcggcaccaatagcaacgaaaccgaaaccttcagacctgccggcggagacatgagagacaattggagaagcgagctgtacaagtacaaggtggtcaagatcgagcccctgggcgtcgcacctacacggtgcaagagaagagtcgtgggccgtcgtagaaggcggagagccgttggaattggcgccgtgttcctgggctttctgggagccgctggatctacaatgggcgctgccagcatgaccctgacagtgcaggctagaaatctgctgagcggcatcgtgcagcagcagagcaatctgctcagagcccctgaggctcagcagcacctcctgaaactgacagtgtggggaatcaagcagctgcaggccagagtgctggcagtggaaagatacctgagggaccagcagctcctcggaatctggggctgttctggcaagctgatctgctgcaccaacgtgccctggaacagctcctggtccaacagaaacctgtccgagatctgggataacatgacctggctgcagtgggacaaagagatcagcaactacacccagatcatctacggcctgctggaagagagccagaaccagcaagagaaaaacgagcaggacctgctggccctggatggcggaggatctggcggaggcggttctggcggcggaggaagcggaggcggaggctcaggtggtggcggatctggagatatcatcaagctgctgaacgagcaagtgaacaaagaaatgaactcctccaacctgtacatgagcatgagcagctggtgttacacccacagccttgatggcgccggactgttcctgtttgatcacgccgccgaggaatacgagcacgccaagaagctgatcatcttcctgaacgagaacaatgtgcccgtgcagctgaccagcattagcgccccagagcacaagttcgagggcctgacacagatctttcagaaggcctacgaacacgagcagcacatctccgagagcatcaacaacatcgtggaccacgccattaagtccaaggatcacgccaccttcaattttctgcagtggtacgtggccgaacagcacgaggaagaagtgctgttcaaggacatcctggacaagattgagctgatcggcaacgagaaccacggcctgtatctggccgaccagtacgtgaagggaatcgccaagagccggaagtcctgatgaggatcc

SEQ ID NO: 240 - DNA, 2517 bp, synthetic construct
  source 1..2517: mol_type = other DNA
gtcgacgccaccatgcctatgggatctctgcagcctctggccacactgtacctgctgggaatgctggtggcttctgtgctggccgccgagaatctgtgggtcacagtgtactatggcgtgcccgtgtggaaagaggccaagaccacactgttctgcgcctccgatgccagagcctacgagaaagaggtgcacaacgtctgggccacacacgcctgtgtgcctaccgatccatctcctcaagagctggtgctgggcaacgtgaccgagaacttcaacatgtggaagaacgacatggtggaccagatgcacgaggacatcatcagcctgtgggaccagagcctgaagccttgcgtgaagctgacccctctgtgcgtgaccctgatctgttctgacgccaccgtgaaaaccggcaccgtggaagagatgaagaactgcagcttcaacaccaccaccgagatccgggacaagaagaagaaagagtacgccctgttctacaagcccgacatcgtgcccctgagcgagacaaacaacaccagcgagtaccggctgatcaactgcaacacctccgcctgcactcaggcctgtcctaaagtgaccttcgagcccattcctatccactactgtgcccctgccggctacgccatcctgaagtgcaacaacgagacattcaacggcacaggcccctgcagcaatgtgtccaccgtgcagtgtacccacggcatcagaccagtggtgtctacccagctgctgctgaatggaagcctggccgagaaagaaatcgtgatcagaagcgagaacctgaccaacaacgccaagatcatcatcgtccacctgaataccagcgtggaaatcgtgtgcacccggcctaacaacaacacccggaagtctgtgcggatcggccctggccagacattctatgccaccggcgatatcatcggcgacatcaagcaggcccactgcaacatcagcgaggaaaagtggaacgacaccctgcagaaagtgggcatcgagctgcagaagcacttccccaacaagaccatcaagtacaaccagagcgctggcggcgacatggaaatcaccacacacagcttcaattgtggcggcgagttcttctactgcaataccagcaacctgttcaacgggacctacaatggcacctacatcagcaccaacagcagcgccaactccaccagcaccatcactctgcagtgccggatcaagcagatcatcaatatgtggcaaggcgtcggccggtgtatgtacgcccctcctatcgccggcaacatcacctgtcggagcaatatcacaggcctgctgctcaccagagatggcggcaccaatagcaacgaaaccgaaaccttcagacctgccggcggagacatgagagacaattggagaagcgagctgtacaagtacaaggtggtcaagatcgagcccctgggcgtcgcacctacacggtgcaagagaagagtcgtgggccgtcgtagaaggcggagagccgttggaattggcgccgtgttcctgggctttctgggagccgctggatctacaatgggcgctgccagcatgaccctgacagtgcaggctagaaatctgctgagcggcatcgtgcagcagcagagcaatctgctcagagcccctgaggctcagcagcacctcctgaaactgacagtgtggggaatcaagcagctgcaggccagagtgctggcagtggaaagatacctgagggaccagcagctcctcggaatctggggctgttctggcaagctgatctgctgcaccaacgtgccctggaacagctcctggtccaacagaaacctgtccgagatctgggataacatgacctggctgcagtgggacaaagagatcagcaactacacccagatcatctacggcctgctggaagagagccagaaccagcaagagaaaaacgagcaggacctgctggccctggatggcggaggatctggcggaggcggttctggcggcggaggaagcggaggcggaggctcaggtgatatcatcaagctgctgaacgagcaagtgaacaaagaaatgaactcctccaacctgtacatgagcatgagcagctggtgttacacccacagccttgatggcgccggactgttcctgtttgatcacgccgccgaggaatacgagcacgccaagaagctgatcatcttcctgaacgagaacaatgtgcccgtgcagctgaccagcattagcgccccagagcacaagttcgagggcctgacacagatctttcagaaggcctacgaacacgagcagcacatctccgagagcatcaacaacatcgtggaccacgccattaagtccaaggatcacgccaccttcaattttctgcagtggtacgtggccgaacagcacgaggaagaagtgctgttcaaggacatcctggacaagattgagctgatcggcaacgagaaccacggcctgtatctggccgaccagtacgtgaagggaatcgccaagagccggaagtcctgatgaggatcc

SEQ ID NO: 241 - DNA, 2502 bp, synthetic construct
  source 1..2502: mol_type = other DNA
gtcgacgccaccatgcctatgggatctctgcagcctctggccacactgtacctgctgggaatgctggtggcttctgtgctggccgccgagaatctgtgggtcacagtgtactatggcgtgcccgtgtggaaagaggccaagaccacactgttctgcgcctccgatgccagagcctacgagaaagaggtgcacaacgtctgggccacacacgcctgtgtgcctaccgatccatctcctcaagagctggtgctgggcaacgtgaccgagaacttcaacatgtggaagaacgacatggtggaccagatgcacgaggacatcatcagcctgtgggaccagagcctgaagccttgcgtgaagctgacccctctgtgcgtgaccctgatctgttctgacgccaccgtgaaaaccggcaccgtggaagagatgaagaactgcagcttcaacaccaccaccgagatccgggacaagaagaagaaagagtacgccctgttctacaagcccgacatcgtgcccctgagcgagacaaacaacaccagcgagtaccggctgatcaactgcaacacctccgcctgcactcaggcctgtcctaaagtgaccttcgagcccattcctatccactactgtgcccctgccggctacgccatcctgaagtgcaacaacgagacattcaacggcacaggcccctgcagcaatgtgtccaccgtgcagtgtacccacggcatcagaccagtggtgtctacccagctgctgctgaatggaagcctggccgagaaagaaatcgtgatcagaagcgagaacctgaccaacaacgccaagatcatcatcgtccacctgaataccagcgtggaaatcgtgtgcacccggcctaacaacaacacccggaagtctgtgcggatcggccctggccagacattctatgccaccggcgatatcatcggcgacatcaagcaggcccactgcaacatcagcgaggaaaagtggaacgacaccctgcagaaagtgggcatcgagctgcagaagcacttccccaacaagaccatcaagtacaaccagagcgctggcggcgacatggaaatcaccacacacagcttcaattgtggcggcgagttcttctactgcaataccagcaacctgttcaacgggacctacaatggcacctacatcagcaccaacagcagcgccaactccaccagcaccatcactctgcagtgccggatcaagcagatcatcaatatgtggcaaggcgtcggccggtgtatgtacgcccctcctatcgccggcaacatcacctgtcggagcaatatcacaggcctgctgctcaccagagatggcggcaccaatagcaacgaaaccgaaaccttcagacctgccggcggagacatgagagacaattggagaagcgagctgtacaagtacaaggtggtcaagatcgagcccctgggcgtcgcacctacacggtgcaagagaagagtcgtgggccgtcgtagaaggcggagagccgttggaattggcgccgtgttcctgggctttctgggagccgctggatctacaatgggcgctgccagcatgaccctgacagtgcaggctagaaatctgctgagcggcatcgtgcagcagcagagcaatctgctcagagcccctgaggctcagcagcacctcctgaaactgacagtgtggggaatcaagcagctgcaggccagagtgctggcagtggaaagatacctgagggaccagcagctcctcggaatctggggctgttctggcaagctgatctgctgcaccaacgtgccctggaacagctcctggtccaacagaaacctgtccgagatctgggataacatgacctggctgcagtgggacaaagagatcagcaactacacccagatcatctacggcctgctggaagagagccagaaccagcaagagaaaaacgagcaggacctgctggccctggatggcggaggatctggcggaggcggttctggcggcggaggaagcggagatatcatcaagctgctgaacgagcaagtgaacaaagaaatgaactcctccaacctgtacatgagcatgagcagctggtgttacacccacagccttgatggcgccggactgttcctgtttgatcacgccgccgaggaatacgagcacgccaagaagctgatcatcttcctgaacgagaacaatgtgcccgtgcagctgaccagcattagcgccccagagcacaagttcgagggcctgacacagatctttcagaaggcctacgaacacgagcagcacatctccgagagcatcaacaacatcgtggaccacgccattaagtccaaggatcacgccaccttcaattttctgcagtggtacgtggccgaacagcacgaggaagaagtgctgttcaaggacatcctggacaagattgagctgatcggcaacgagaaccacggcctgtatctggccgaccagtacgtgaagggaatcgccaagagccggaagtcctgatgaggatcc

SEQ ID NO: 242 - DNA, 2487 bp, synthetic construct
  source 1..2487: mol_type = other DNA
gtcgacgccaccatgcctatgggatctctgcagcctctggccacactgtacctgctgggaatgctggtggcttctgtgctggccgccgagaatctgtgggtcacagtgtactatggcgtgcccgtgtggaaagaggccaagaccacactgttctgcgcctccgatgccagagcctacgagaaagaggtgcacaacgtctgggccacacacgcctgtgtgcctaccgatccatctcctcaagagctggtgctgggcaacgtgaccgagaacttcaacatgtggaagaacgacatggtggaccagatgcacgaggacatcatcagcctgtgggaccagagcctgaagccttgcgtgaagctgacccctctgtgcgtgaccctgatctgttctgacgccaccgtgaaaaccggcaccgtggaagagatgaagaactgcagcttcaacaccaccaccgagatccgggacaagaagaagaaagagtacgccctgttctacaagcccgacatcgtgcccctgagcgagacaaacaacaccagcgagtaccggctgatcaactgcaacacctccgcctgcactcaggcctgtcctaaagtgaccttcgagcccattcctatccactactgtgcccctgccggctacgccatcctgaagtgcaacaacgagacattcaacggcacaggcccctgcagcaatgtgtccaccgtgcagtgtacccacggcatcagaccagtggtgtctacccagctgctgctgaatggaagcctggccgagaaagaaatcgtgatcagaagcgagaacctgaccaacaacgccaagatcatcatcgtccacctgaataccagcgtggaaatcgtgtgcacccggcctaacaacaacacccggaagtctgtgcggatcggccctggccagacattctatgccaccggcgatatcatcggcgacatcaagcaggcccactgcaacatcagcgaggaaaagtggaacgacaccctgcagaaagtgggcatcgagctgcagaagcacttccccaacaagaccatcaagtacaaccagagcgctggcggcgacatggaaatcaccacacacagcttcaattgtggcggcgagttcttctactgcaataccagcaacctgttcaacgggacctacaatggcacctacatcagcaccaacagcagcgccaactccaccagcaccatcactctgcagtgccggatcaagcagatcatcaatatgtggcaaggcgtcggccggtgtatgtacgcccctcctatcgccggcaacatcacctgtcggagcaatatcacaggcctgctgctcaccagagatggcggcaccaatagcaacgaaaccgaaaccttcagacctgccggcggagacatgagagacaattggagaagcgagctgtacaagtacaaggtggtcaagatcgagcccctgggcgtcgcacctacacggtgcaagagaagagtcgtgggccgtcgtagaaggcggagagccgttggaattggcgccgtgttcctgggctttctgggagccgctggatctacaatgggcgctgccagcatgaccctgacagtgcaggctagaaatctgctgagcggcatcgtgcagcagcagagcaatctgctcagagcccctgaggctcagcagcacctcctgaaactgacagtgtggggaatcaagcagctgcaggccagagtgctggcagtggaaagatacctgagggaccagcagctcctcggaatctggggctgttctggcaagctgatctgctgcaccaacgtgccctggaacagctcctggtccaacagaaacctgtccgagatctgggataacatgacctggctgcagtgggacaaagagatcagcaactacacccagatcatctacggcctgctggaagagagccagaaccagcaagagaaaaacgagcaggacctgctggccctggatggcggaggatctggcggaggcggttctggcgatatcatcaagctgctgaacgagcaagtgaacaaagaaatgaactcctccaacctgtacatgagcatgagcagctggtgttacacccacagccttgatggcgccggactgttcctgtttgatcacgccgccgaggaatacgagcacgccaagaagctgatcatcttcctgaacgagaacaatgtgcccgtgcagctgaccagcattagcgccccagagcacaagttcgagggcctgacacagatctttcagaaggcctacgaacacgagcagcacatctccgagagcatcaacaacatcgtggaccacgccattaagtccaaggatcacgccaccttcaattttctgcagtggtacgtggccgaacagcacgaggaagaagtgctgttcaaggacatcctggacaagattgagctgatcggcaacgagaaccacggcctgtatctggccgaccagtacgtgaagggaatcgccaagagccggaagtcctgatgaggatcc

SEQ ID NO: 243 - DNA, 2541 bp, synthetic construct
  source 1..2541: mol_type = other DNA
gtcgacgccaccatgcctatgggatctctgcagcctctggccacactgtacctgctgggaatgctggtggcttctgtgctggccgccgagaatctgtgggtcacagtgtactatggcgtgcccgtgtggaaagaggccaagaccacactgttctgcgcctccgatgccagagcctacgagaaagaggtgcacaacgtctgggccacacacgcctgtgtgcctaccgatccatctcctcaagagctggtgctgggcaacgtgaccgagaacttcaacatgtggaagaacgacatggtggaccagatgcacgaggacatcatcagcctgtgggaccagagcctgaagccttgcgtgaagctgacccctctgtgcgtgaccctgatctgttctgacgccaccgtgaaaaccggcaccgtggaagagatgaagaactgcagcttcaacaccaccaccgagatccgggacaagaagaagaaagagtacgccctgttctacaagcccgacatcgtgcccctgagcgagacaaacaacaccagcgagtaccggctgatcaactgcaacacctccgcctgcactcaggcctgtcctaaagtgaccttcgagcccattcctatccactactgtgcccctgccggctacgccatcctgaagtgcaacaacgagacattcaacggcacaggcccctgcagcaatgtgtccaccgtgcagtgtacccacggcatcagaccagtggtgtctacccagctgctgctgaatggaagcctggccgagaaagaaatcgtgatcagaagcgagaacctgaccaacaacgccaagatcatcatcgtccacctgaataccagcgtggaaatcgtgtgcacccggcctaacaacaacacccggaagtctgtgcggatcggccctggccagacattctatgccaccggcgatatcatcggcgacatcaagcaggcccactgcaacatcagcgaggaaaagtggaacgacaccctgcagaaagtgggcatcgagctgcagaagcacttccccaacaagaccatcaagtacaaccagagcgctggcggcgacatggaaatcaccacacacagcttcaattgtggcggcgagttcttctactgcaataccagcaacctgttcaacgggacctacaatggcacctacatcagcaccaacagcagcgccaactccaccagcaccatcactctgcagtgccggatcaagcagatcatcaatatgtggcaaggcgtcggccggtgtatgtacgcccctcctatcgccggcaacatcacctgtcggagcaatatcacaggcctgctgctcaccagagatggcggcaccaatagcaacgaaaccgaaaccttcagacctgccggcggagacatgagagacaattggagaagcgagctgtacaagtacaaggtggtcaagatcgagcccctgggcgtcgcacctacacggtgcaagagaagagtcgtgggccgtcgtagaaggcggagagccgttggaattggcgccgtgttcctgggctttctgggagccgctggatctacaatgggcgctgccagcatgaccctgacagtgcaggctagaaatctgctgagcggcatcgtgcagcagcagagcaatctgctcagagcccctgaggctcagcagcacctcctgaaactgacagtgtggggaatcaagcagctgcaggccagagtgctggcagtggaaagatacctgagggaccagcagctcctcggaatctggggctgttctggcaagctgatctgctgcaccaacgtgccctggaacagctcctggtccaacagaaacctgtccgagatctgggataacatgacctggctgcagtgggacaaagagatcagcaactacacccagatcatctacggcctgctggaagagagccagaaccagcaagagaaaaacgagcaggacctgctggccctggatggcggaggatctggcggaggcggttctggcggcggaggaagcggaggcggaggctcaggtggtggcggatctggactgagcaaggatatcatcaagctgctgaacgagcaagtgaacaaagaaatgaactcctccaacctgtacatgagcatgagcagctggtgttacacccacagccttgatggcgccggactgttcctgtttgatcacgccgccgaggaatacgagcacgccaagaagctgatcatcttcctgaacgagaacaatgtgcccgtgcagctgaccagcattagcgccccagagcacaagttcgagggcctgacacagatctttcagaaggcctacgaacacgagcagcacatctccgagagcatcaacaacatcgtggaccacgccattaagtccaaggatcacgccaccttcaattttctgcagtggtacgtggccgaacagcacgaggaagaagtgctgttcaaggacatcctggacaagattgagctgatcggcaacgagaaccacggcctgtatctggccgaccagtacgtgaagggaatcgccaagagccggaagtcctgatgaggatcc

SEQ ID NO: 244 - DNA, 2526 bp, synthetic construct
  source 1..2526: mol_type = other DNA
gtcgacgccaccatgcctatgggatctctgcagcctctggccacactgtacctgctgggaatgctggtggcttctgtgctggccgccgagaatctgtgggtcacagtgtactatggcgtgcccgtgtggaaagaggccaagaccacactgttctgcgcctccgatgccagagcctacgagaaagaggtgcacaacgtctgggccacacacgcctgtgtgcctaccgatccatctcctcaagagctggtgctgggcaacgtgaccgagaacttcaacatgtggaagaacgacatggtggaccagatgcacgaggacatcatcagcctgtgggaccagagcctgaagccttgcgtgaagctgacccctctgtgcgtgaccctgatctgttctgacgccaccgtgaaaaccggcaccgtggaagagatgaagaactgcagcttcaacaccaccaccgagatccgggacaagaagaagaaagagtacgccctgttctacaagcccgacatcgtgcccctgagcgagacaaacaacaccagcgagtaccggctgatcaactgcaacacctccgcctgcactcaggcctgtcctaaagtgaccttcgagcccattcctatccactactgtgcccctgccggctacgccatcctgaagtgcaacaacgagacattcaacggcacaggcccctgcagcaatgtgtccaccgtgcagtgtacccacggcatcagaccagtggtgtctacccagctgctgctgaatggaagcctggccgagaaagaaatcgtgatcagaagcgagaacctgaccaacaacgccaagatcatcatcgtccacctgaataccagcgtggaaatcgtgtgcacccggcctaacaacaacacccggaagtctgtgcggatcggccctggccagacattctatgccaccggcgatatcatcggcgacatcaagcaggcccactgcaacatcagcgaggaaaagtggaacgacaccctgcagaaagtgggcatcgagctgcagaagcacttccccaacaagaccatcaagtacaaccagagcgctggcggcgacatggaaatcaccacacacagcttcaattgtggcggcgagttcttctactgcaataccagcaacctgttcaacgggacctacaatggcacctacatcagcaccaacagcagcgccaactccaccagcaccatcactctgcagtgccggatcaagcagatcatcaatatgtggcaaggcgtcggccggtgtatgtacgcccctcctatcgccggcaacatcacctgtcggagcaatatcacaggcctgctgctcaccagagatggcggcaccaatagcaacgaaaccgaaaccttcagacctgccggcggagacatgagagacaattggagaagcgagctgtacaagtacaaggtggtcaagatcgagcccctgggcgtcgcacctacacggtgcaagagaagagtcgtgggccgtcgtagaaggcggagagccgttggaattggcgccgtgttcctgggctttctgggagccgctggatctacaatgggcgctgccagcatgaccctgacagtgcaggctagaaatctgctgagcggcatcgtgcagcagcagagcaatctgctcagagcccctgaggctcagcagcacctcctgaaactgacagtgtggggaatcaagcagctgcaggccagagtgctggcagtggaaagatacctgagggaccagcagctcctcggaatctggggctgttctggcaagctgatctgctgcaccaacgtgccctggaacagctcctggtccaacagaaacctgtccgagatctgggataacatgacctggctgcagtgggacaaagagatcagcaactacacccagatcatctacggcctgctggaagagagccagaaccagcaagagaaaaacgagcaggacctgctggccctggatggcggaggatctggcggaggcggttctggcggcggaggaagcggaggcggaggctcaggtctgagcaaggatatcatcaagctgctgaacgagcaagtgaacaaagaaatgaactcctccaacctgtacatgagcatgagcagctggtgttacacccacagccttgatggcgccggactgttcctgtttgatcacgccgccgaggaatacgagcacgccaagaagctgatcatcttcctgaacgagaacaatgtgcccgtgcagctgaccagcattagcgccccagagcacaagttcgagggcctgacacagatctttcagaaggcctacgaacacgagcagcacatctccgagagcatcaacaacatcgtggaccacgccattaagtccaaggatcacgccaccttcaattttctgcagtggtacgtggccgaacagcacgaggaagaagtgctgttcaaggacatcctggacaagattgagctgatcggcaacgagaaccacggcctgtatctggccgaccagtacgtgaagggaatcgccaagagccggaagtcctgatgaggatcc

SEQ ID NO: 245 - DNA, 2511 bp, synthetic construct
  source 1..2511: mol_type = other DNA
gtcgacgccaccatgcctatgggatctctgcagcctctggccacactgtacctgctgggaatgctggtggcttctgtgctggccgccgagaatctgtgggtcacagtgtactatggcgtgcccgtgtggaaagaggccaagaccacactgttctgcgcctccgatgccagagcctacgagaaagaggtgcacaacgtctgggccacacacgcctgtgtgcctaccgatccatctcctcaagagctggtgctgggcaacgtgaccgagaacttcaacatgtggaagaacgacatggtggaccagatgcacgaggacatcatcagcctgtgggaccagagcctgaagccttgcgtgaagctgacccctctgtgcgtgaccctgatctgttctgacgccaccgtgaaaaccggcaccgtggaagagatgaagaactgcagcttcaacaccaccaccgagatccgggacaagaagaagaaagagtacgccctgttctacaagcccgacatcgtgcccctgagcgagacaaacaacaccagcgagtaccggctgatcaactgcaacacctccgcctgcactcaggcctgtcctaaagtgaccttcgagcccattcctatccactactgtgcccctgccggctacgccatcctgaagtgcaacaacgagacattcaacggcacaggcccctgcagcaatgtgtccaccgtgcagtgtacccacggcatcagaccagtggtgtctacccagctgctgctgaatggaagcctggccgagaaagaaatcgtgatcagaagcgagaacctgaccaacaacgccaagatcatcatcgtccacctgaataccagcgtggaaatcgtgtgcacccggcctaacaacaacacccggaagtctgtgcggatcggccctggccagacattctatgccaccggcgatatcatcggcgacatcaagcaggcccactgcaacatcagcgaggaaaagtggaacgacaccctgcagaaagtgggcatcgagctgcagaagcacttccccaacaagaccatcaagtacaaccagagcgctggcggcgacatggaaatcaccacacacagcttcaattgtggcggcgagttcttctactgcaataccagcaacctgttcaacgggacctacaatggcacctacatcagcaccaacagcagcgccaactccaccagcaccatcactctgcagtgccggatcaagcagatcatcaatatgtggcaaggcgtcggccggtgtatgtacgcccctcctatcgccggcaacatcacctgtcggagcaatatcacaggcctgctgctcaccagagatggcggcaccaatagcaacgaaaccgaaaccttcagacctgccggcggagacatgagagacaattggagaagcgagctgtacaagtacaaggtggtcaagatcgagcccctgggcgtcgcacctacacggtgcaagagaagagtcgtgggccgtcgtagaaggcggagagccgttggaattggcgccgtgttcctgggctttctgggagccgctggatctacaatgggcgctgccagcatgaccctgacagtgcaggctagaaatctgctgagcggcatcgtgcagcagcagagcaatctgctcagagcccctgaggctcagcagcacctcctgaaactgacagtgtggggaatcaagcagctgcaggccagagtgctggcagtggaaagatacctgagggaccagcagctcctcggaatctggggctgttctggcaagctgatctgctgcaccaacgtgccctggaacagctcctggtccaacagaaacctgtccgagatctgggataacatgacctggctgcagtgggacaaagagatcagcaactacacccagatcatctacggcctgctggaagagagccagaaccagcaagagaaaaacgagcaggacctgctggccctggatggcggaggatctggcggaggcggttctggcggcggaggaagcggactgagcaaggatatcatcaagctgctgaacgagcaagtgaacaaagaaatgaactcctccaacctgtacatgagcatgagcagctggtgttacacccacagccttgatggcgccggactgttcctgtttgatcacgccgccgaggaatacgagcacgccaagaagctgatcatcttcctgaacgagaacaatgtgcccgtgcagctgaccagcattagcgccccagagcacaagttcgagggcctgacacagatctttcagaaggcctacgaacacgagcagcacatctccgagagcatcaacaacatcgtggaccacgccattaagtccaaggatcacgccaccttcaattttctgcagtggtacgtggccgaacagcacgaggaagaagtgctgttcaaggacatcctggacaagattgagctgatcggcaacgagaaccacggcctgtatctggccgaccagtacgtgaagggaatcgccaagagccggaagtcctgatgaggatcc

SEQ ID NO: 246 - DNA, 2496 bp, synthetic construct
  source 1..2496: mol_type = other DNA
gtcgacgccaccatgcctatgggatctctgcagcctctggccacactgtacctgctgggaatgctggtggcttctgtgctggccgccgagaatctgtgggtcacagtgtactatggcgtgcccgtgtggaaagaggccaagaccacactgttctgcgcctccgatgccagagcctacgagaaagaggtgcacaacgtctgggccacacacgcctgtgtgcctaccgatccatctcctcaagagctggtgctgggcaacgtgaccgagaacttcaacatgtggaagaacgacatggtggaccagatgcacgaggacatcatcagcctgtgggaccagagcctgaagccttgcgtgaagctgacccctctgtgcgtgaccctgatctgttctgacgccaccgtgaaaaccggcaccgtggaagagatgaagaactgcagcttcaacaccaccaccgagatccgggacaagaagaagaaagagtacgccctgttctacaagcccgacatcgtgcccctgagcgagacaaacaacaccagcgagtaccggctgatcaactgcaacacctccgcctgcactcaggcctgtcctaaagtgaccttcgagcccattcctatccactactgtgcccctgccggctacgccatcctgaagtgcaacaacgagacattcaacggcacaggcccctgcagcaatgtgtccaccgtgcagtgtacccacggcatcagaccagtggtgtctacccagctgctgctgaatggaagcctggccgagaaagaaatcgtgatcagaagcgagaacctgaccaacaacgccaagatcatcatcgtccacctgaataccagcgtggaaatcgtgtgcacccggcctaacaacaacacccggaagtctgtgcggatcggccctggccagacattctatgccaccggcgatatcatcggcgacatcaagcaggcccactgcaacatcagcgaggaaaagtggaacgacaccctgcagaaagtgggcatcgagctgcagaagcacttccccaacaagaccatcaagtacaaccagagcgctggcggcgacatggaaatcaccacacacagcttcaattgtggcggcgagttcttctactgcaataccagcaacctgttcaacgggacctacaatggcacctacatcagcaccaacagcagcgccaactccaccagcaccatcactctgcagtgccggatcaagcagatcatcaatatgtggcaaggcgtcggccggtgtatgtacgcccctcctatcgccggcaacatcacctgtcggagcaatatcacaggcctgctgctcaccagagatggcggcaccaatagcaacgaaaccgaaaccttcagacctgccggcggagacatgagagacaattggagaagcgagctgtacaagtacaaggtggtcaagatcgagcccctgggcgtcgcacctacacggtgcaagagaagagtcgtgggccgtcgtagaaggcggagagccgttggaattggcgccgtgttcctgggctttctgggagccgctggatctacaatgggcgctgccagcatgaccctgacagtgcaggctagaaatctgctgagcggcatcgtgcagcagcagagcaatctgctcagagcccctgaggctcagcagcacctcctgaaactgacagtgtggggaatcaagcagctgcaggccagagtgctggcagtggaaagatacctgagggaccagcagctcctcggaatctggggctgttctggcaagctgatctgctgcaccaacgtgccctggaacagctcctggtccaacagaaacctgtccgagatctgggataacatgacctggctgcagtgggacaaagagatcagcaactacacccagatcatctacggcctgctggaagagagccagaaccagcaagagaaaaacgagcaggacctgctggccctggatggcggaggatctggcggaggcggttctggcctgagcaaggatatcatcaagctgctgaacgagcaagtgaacaaagaaatgaactcctccaacctgtacatgagcatgagcagctggtgttacacccacagccttgatggcgccggactgttcctgtttgatcacgccgccgaggaatacgagcacgccaagaagctgatcatcttcctgaacgagaacaatgtgcccgtgcagctgaccagcattagcgccccagagcacaagttcgagggcctgacacagatctttcagaaggcctacgaacacgagcagcacatctccgagagcatcaacaacatcgtggaccacgccattaagtccaaggatcacgccaccttcaattttctgcagtggtacgtggccgaacagcacgaggaagaagtgctgttcaaggacatcctggacaagattgagctgatcggcaacgagaaccacggcctgtatctggccgaccagtacgtgaagggaatcgccaagagccggaagtcctgatgaggatcc

SEQ ID NO: 247 - DNA, 2481 bp, synthetic construct
  source 1..2481: mol_type = other DNA
gtcgacgccaccatgcctatgggatctctgcagcctctggccacactgtacctgctgggaatgctggtggcttctgtgctggccgccgagaatctgtgggtcacagtgtactatggcgtgcccgtgtggaaagaggccaagaccacactgttctgcgcctccgatgccagagcctacgagaaagaggtgcacaacgtctgggccacacacgcctgtgtgcctaccgatccatctcctcaagagctggtgctgggcaacgtgaccgagaacttcaacatgtggaagaacgacatggtggaccagatgcacgaggacatcatcagcctgtgggaccagagcctgaagccttgcgtgaagctgacccctctgtgcgtgaccctgatctgttctgacgccaccgtgaaaaccggcaccgtggaagagatgaagaactgcagcttcaacaccaccaccgagatccgggacaagaagaagaaagagtacgccctgttctacaagcccgacatcgtgcccctgagcgagacaaacaacaccagcgagtaccggctgatcaactgcaacacctccgcctgcactcaggcctgtcctaaagtgaccttcgagcccattcctatccactactgtgcccctgccggctacgccatcctgaagtgcaacaacgagacattcaacggcacaggcccctgcagcaatgtgtccaccgtgcagtgtacccacggcatcagaccagtggtgtctacccagctgctgctgaatggaagcctggccgagaaagaaatcgtgatcagaagcgagaacctgaccaacaacgccaagatcatcatcgtccacctgaataccagcgtggaaatcgtgtgcacccggcctaacaacaacacccggaagtctgtgcggatcggccctggccagacattctatgccaccggcgatatcatcggcgacatcaagcaggcccactgcaacatcagcgaggaaaagtggaacgacaccctgcagaaagtgggcatcgagctgcagaagcacttccccaacaagaccatcaagtacaaccagagcgctggcggcgacatggaaatcaccacacacagcttcaattgtggcggcgagttcttctactgcaataccagcaacctgttcaacgggacctacaatggcacctacatcagcaccaacagcagcgccaactccaccagcaccatcactctgcagtgccggatcaagcagatcatcaatatgtggcaaggcgtcggccggtgtatgtacgcccctcctatcgccggcaacatcacctgtcggagcaatatcacaggcctgctgctcaccagagatggcggcaccaatagcaacgaaaccgaaaccttcagacctgccggcggagacatgagagacaattggagaagcgagctgtacaagtacaaggtggtcaagatcgagcccctgggcgtcgcacctacacggtgcaagagaagagtcgtgggccgtcgtagaaggcggagagccgttggaattggcgccgtgttcctgggctttctgggagccgctggatctacaatgggcgctgccagcatgaccctgacagtgcaggctagaaatctgctgagcggcatcgtgcagcagcagagcaatctgctcagagcccctgaggctcagcagcacctcctgaaactgacagtgtggggaatcaagcagctgcaggccagagtgctggcagtggaaagatacctgagggaccagcagctcctcggaatctggggctgttctggcaagctgatctgctgcaccaacgtgccctggaacagctcctggtccaacagaaacctgtccgagatctgggataacatgacctggctgcagtgggacaaagagatcagcaactacacccagatcatctacggcctgctggaagagagccagaaccagcaagagaaaaacgagcaggacctgctggccctggatggcggaggatctggcctgagcaaggatatcatcaagctgctgaacgagcaagtgaacaaagaaatgaactcctccaacctgtacatgagcatgagcagctggtgttacacccacagccttgatggcgccggactgttcctgtttgatcacgccgccgaggaatacgagcacgccaagaagctgatcatcttcctgaacgagaacaatgtgcccgtgcagctgaccagcattagcgccccagagcacaagttcgagggcctgacacagatctttcagaaggcctacgaacacgagcagcacatctccgagagcatcaacaacatcgtggaccacgccattaagtccaaggatcacgccaccttcaattttctgcagtggtacgtggccgaacagcacgaggaagaagtgctgttcaaggacatcctggacaagattgagctgatcggcaacgagaaccacggcctgtatctggccgaccagtacgtgaagggaatcgccaagagccggaagtcctgatgaggatcc

SEQ ID NO: 248 - protein, 836 aa, synthetic construct
MPMGSLQPLATLYLLGMLVASVLAAENLWVTVYYGVPVWKEAKTTLFCASDARAYEKEVHNVWATHACVPTDPSPQELVLGNVTENFNMWKNDMVDQMHEDIISLWDQSLKPCVKLTPLCVTLICSDATVKTGTVEEMKNCSFNTTTEIRDKKKKEYALFYKPDIVPLSETNNTSEYRLINCNTSACTQACPKVTFEPIPIHYCAPAGYAILKCNNETFNGTGPCSNVSTVQCTHGIRPVVSTQLLLNGSLAEKEIVIRSENLTNNAKIIIVHLNTSVEIVCTRPNNNTRKSVRIGPGQTFYATGDIIGDIKQAHCNISEEKWNDTLQKVGIELQKHFPNKTIKYNQSAGGDMEITTHSFNCGGEFFYCNTSNLFNGTYNGTYISTNSSANSTSTITLQCRIKQIINMWQGVGRCMYAPPIAGNITCRSNITGLLLTRDGGTNSNETETFRPAGGDMRDNWRSELYKYKVVKIEPLGVAPTRCKRRVVGRRRRRRAVGIGAVFLGFLGAAGSTMGAASMTLTVQARNLLSGIVQQQSNLLRAPEAQQHLLKLTVWGIKQLQARVLAVERYLRDQQLLGIWGCSGKLICCTNVPWNSSWSNRNLSEIWDNMTWLQWDKEISNYTQIIYGLLEESQNQQEKNEQDLLALDGGGSGGGGSGGGGSGGGGSGGGGSGDIIKLLNEQVNKEMNSSNLYMSMSSWCYTHSLDGAGLFLFDHAAEEYEHAKKLIIFLNENNVPVQLTSISAPEHKFEGLTQIFQKAYEHEQHISESINNIVDHAIKSKDHATFNFLQWYVAEQHEEEVLFKDILDKIELIGNENHGLYLADQYVKGIAKSRKS

SEQ ID NO: 249 - protein, 831 aa, synthetic construct
MPMGSLQPLATLYLLGMLVASVLAAENLWVTVYYGVPVWKEAKTTLFCASDARAYEKEVHNVWATHACVPTDPSPQELVLGNVTENFNMWKNDMVDQMHEDIISLWDQSLKPCVKLTPLCVTLICSDATVKTGTVEEMKNCSFNTTTEIRDKKKKEYALFYKPDIVPLSETNNTSEYRLINCNTSACTQACPKVTFEPIPIHYCAPAGYAILKCNNETFNGTGPCSNVSTVQCTHGIRPVVSTQLLLNGSLAEKEIVIRSENLTNNAKIIIVHLNTSVEIVCTRPNNNTRKSVRIGPGQTFYATGDIIGDIKQAHCNISEEKWNDTLQKVGIELQKHFPNKTIKYNQSAGGDMEITTHSFNCGGEFFYCNTSNLFNGTYNGTYISTNSSANSTSTITLQCRIKQIINMWQGVGRCMYAPPIAGNITCRSNITGLLLTRDGGTNSNETETFRPAGGDMRDNWRSELYKYKVVKIEPLGVAPTRCKRRVVGRRRRRRAVGIGAVFLGFLGAAGSTMGAASMTLTVQARNLLSGIVQQQSNLLRAPEAQQHLLKLTVWGIKQLQARVLAVERYLRDQQLLGIWGCSGKLICCTNVPWNSSWSNRNLSEIWDNMTWLQWDKEISNYTQIIYGLLEESQNQQEKNEQDLLALDGGGSGGGGSGGGGSGGGGSGDIIKLLNEQVNKEMNSSNLYMSMSSWCYTHSLDGAGLFLFDHAAEEYEHAKKLIIFLNENNVPVQLTSISAPEHKFEGLTQIFQKAYEHEQHISESINNIVDHAIKSKDHATFNFLQWYVAEQHEEEVLFKDILDKIELIGNENHGLYLADQYVKGIAKSRKS

SEQ ID NO: 250 - protein, 826 aa, synthetic construct
MPMGSLQPLATLYLLGMLVASVLAAENLWVTVYYGVPVWKEAKTTLFCASDARAYEKEVHNVWATHACVPTDPSPQELVLGNVTENFNMWKNDMVDQMHEDIISLWDQSLKPCVKLTPLCVTLICSDATVKTGTVEEMKNCSFNTTTEIRDKKKKEYALFYKPDIVPLSETNNTSEYRLINCNTSACTQACPKVTFEPIPIHYCAPAGYAILKCNNETFNGTGPCSNVSTVQCTHGIRPVVSTQLLLNGSLAEKEIVIRSENLTNNAKIIIVHLNTSVEIVCTRPNNNTRKSVRIGPGQTFYATGDIIGDIKQAHCNISEEKWNDTLQKVGIELQKHFPNKTIKYNQSAGGDMEITTHSFNCGGEFFYCNTSNLFNGTYNGTYISTNSSANSTSTITLQCRIKQIINMWQGVGRCMYAPPIAGNITCRSNITGLLLTRDGGTNSNETETFRPAGGDMRDNWRSELYKYKVVKIEPLGVAPTRCKRRVVGRRRRRRAVGIGAVFLGFLGAAGSTMGAASMTLTVQARNLLSGIVQQQSNLLRAPEAQQHLLKLTVWGIKQLQARVLAVERYLRDQQLLGIWGCSGKLICCTNVPWNSSWSNRNLSEIWDNMTWLQWDKEISNYTQIIYGLLEESQNQQEKNEQDLLALDGGGSGGGGSGGGGSGDIIKLLNEQVNKEMNSSNLYMSMSSWCYTHSLDGAGLFLFDHAAEEYEHAKKLIIFLNENNVPVQLTSISAPEHKFEGLTQIFQKAYEHEQHISESINNIVDHAIKSKDHATFNFLQWYVAEQHEEEVLFKDILDKIELIGNENHGLYLADQYVKGIAKSRKS

SEQ ID NO: 251 - protein, 821 aa, synthetic construct
MPMGSLQPLATLYLLGMLVASVLAAENLWVTVYYGVPVWKEAKTTLFCASDARAYEKEVHNVWATHACVPTDPSPQELVLGNVTENFNMWKNDMVDQMHEDIISLWDQSLKPCVKLTPLCVTLICSDATVKTGTVEEMKNCSFNTTTEIRDKKKKEYALFYKPDIVPLSETNNTSEYRLINCNTSACTQACPKVTFEPIPIHYCAPAGYAILKCNNETFNGTGPCSNVSTVQCTHGIRPVVSTQLLLNGSLAEKEIVIRSENLTNNAKIIIVHLNTSVEIVCTRPNNNTRKSVRIGPGQTFYATGDIIGDIKQAHCNISEEKWNDTLQKVGIELQKHFPNKTIKYNQSAGGDMEITTHSFNCGGEFFYCNTSNLFNGTYNGTYISTNSSANSTSTITLQCRIKQIINMWQGVGRCMYAPPIAGNITCRSNITGLLLTRDGGTNSNETETFRPAGGDMRDNWRSELYKYKVVKIEPLGVAPTRCKRRVVGRRRRRRAVGIGAVFLGFLGAAGSTMGAASMTLTVQARNLLSGIVQQQSNLLRAPEAQQHLLKLTVWGIKQLQARVLAVERYLRDQQLLGIWGCSGKLICCTNVPWNSSWSNRNLSEIWDNMTWLQWDKEISNYTQIIYGLLEESQNQQEKNEQDLLALDGGGSGGGGSGDIIKLLNEQVNKEMNSSNLYMSMSSWCYTHSLDGAGLFLFDHAAEEYEHAKKLIIFLNENNVPVQLTSISAPEHKFEGLTQIFQKAYEHEQHISESINNIVDHAIKSKDHATFNFLQWYVAEQHEEEVLFKDILDKIELIGNENHGLYLADQYVKGIAKSRKS

SEQ ID NO: 252 - protein, 839 aa, synthetic construct
MPMGSLQPLATLYLLGMLVASVLAAENLWVTVYYGVPVWKEAKTTLFCASDARAYEKEVHNVWATHACVPTDPSPQELVLGNVTENFNMWKNDMVDQMHEDIISLWDQSLKPCVKLTPLCVTLICSDATVKTGTVEEMKNCSFNTTTEIRDKKKKEYALFYKPDIVPLSETNNTSEYRLINCNTSACTQACPKVTFEPIPIHYCAPAGYAILKCNNETFNGTGPCSNVSTVQCTHGIRPVVSTQLLLNGSLAEKEIVIRSENLTNNAKIIIVHLNTSVEIVCTRPNNNTRKSVRIGPGQTFYATGDIIGDIKQAHCNISEEKWNDTLQKVGIELQKHFPNKTIKYNQSAGGDMEITTHSFNCGGEFFYCNTSNLFNGTYNGTYISTNSSANSTSTITLQCRIKQIINMWQGVGRCMYAPPIAGNITCRSNITGLLLTRDGGTNSNETETFRPAGGDMRDNWRSELYKYKVVKIEPLGVAPTRCKRRVVGRRRRRRAVGIGAVFLGFLGAAGSTMGAASMTLTVQARNLLSGIVQQQSNLLRAPEAQQHLLKLTVWGIKQLQARVLAVERYLRDQQLLGIWGCSGKLICCTNVPWNSSWSNRNLSEIWDNMTWLQWDKEISNYTQIIYGLLEESQNQQEKNEQDLLALDGGGSGGGGSGGGGSGGGGSGGGGSGLSKDIIKLLNEQVNKEMNSSNLYMSMSSWCYTHSLDGAGLFLFDHAAEEYEHAKKLIIFLNENNVPVQLTSISAPEHKFEGLTQIFQKAYEHEQHISESINNIVDHAIKSKDHATFNFLQWYVAEQHEEEVLFKDILDKIELIGNENHGLYLADQYVKGIAKSRKS

SEQ ID NO: 253 - protein, 834 aa, synthetic construct
MPMGSLQPLATLYLLGMLVASVLAAENLWVTVYYGVPVWKEAKTTLFCASDARAYEKEVHNVWATHACVPTDPSPQELVLGNVTENFNMWKNDMVDQMHEDIISLWDQSLKPCVKLTPLCVTLICSDATVKTGTVEEMKNCSFNTTTEIRDKKKKEYALFYKPDIVPLSETNNTSEYRLINCNTSACTQACPKVTFEPIPIHYCAPAGYAILKCNNETFNGTGPCSNVSTVQCTHGIRPVVSTQLLLNGSLAEKEIVIRSENLTNNAKIIIVHLNTSVEIVCTRPNNNTRKSVRIGPGQTFYATGDIIGDIKQAHCNISEEKWNDTLQKVGIELQKHFPNKTIKYNQSAGGDMEITTHSFNCGGEFFYCNTSNLFNGTYNGTYISTNSSANSTSTITLQCRIKQIINMWQGVGRCMYAPPIAGNITCRSNITGLLLTRDGGTNSNETETFRPAGGDMRDNWRSELYKYKVVKIEPLGVAPTRCKRRVVGRRRRRRAVGIGAVFLGFLGAAGSTMGAASMTLTVQARNLLSGIVQQQSNLLRAPEAQQHLLKLTVWGIKQLQARVLAVERYLRDQQLLGIWGCSGKLICCTNVPWNSSWSNRNLSEIWDNMTWLQWDKEISNYTQIIYGLLEESQNQQEKNEQDLLALDGGGSGGGGSGGGGSGGGGSGLSKDIIKLLNEQVNKEMNSSNLYMSMSSWCYTHSLDGAGLFLFDHAAEEYEHAKKLIIFLNENNVPVQLTSISAPEHKFEGLTQIFQKAYEHEQHISESINNIVDHAIKSKDHATFNFLQWYVAEQHEEEVLFKDILDKIELIGNENHGLYLADQYVKGIAKSRKS

SEQ ID NO: 254 - protein, 829 aa, synthetic construct
MPMGSLQPLATLYLLGMLVASVLAAENLWVTVYYGVPVWKEAKTTLFCASDARAYEKEVHNVWATHACVPTDPSPQELVLGNVTENFNMWKNDMVDQMHEDIISLWDQSLKPCVKLTPLCVTLICSDATVKTGTVEEMKNCSFNTTTEIRDKKKKEYALFYKPDIVPLSETNNTSEYRLINCNTSACTQACPKVTFEPIPIHYCAPAGYAILKCNNETFNGTGPCSNVSTVQCTHGIRPVVSTQLLLNGSLAEKEIVIRSENLTNNAKIIIVHLNTSVEIVCTRPNNNTRKSVRIGPGQTFYATGDIIGDIKQAHCNISEEKWNDTLQKVGIELQKHFPNKTIKYNQSAGGDMEITTHSFNCGGEFFYCNTSNLFNGTYNGTYISTNSSANSTSTITLQCRIKQIINMWQGVGRCMYAPPIAGNITCRSNITGLLLTRDGGTNSNETETFRPAGGDMRDNWRSELYKYKVVKIEPLGVAPTRCKRRVVGRRRRRRAVGIGAVFLGFLGAAGSTMGAASMTLTVQARNLLSGIVQQQSNLLRAPEAQQHLLKLTVWGIKQLQARVLAVERYLRDQQLLGIWGCSGKLICCTNVPWNSSWSNRNLSEIWDNMTWLQWDKEISNYTQIIYGLLEESQNQQEKNEQDLLALDGGGSGGGGSGGGGSGLSKDIIKLLNEQVNKEMNSSNLYMSMSSWCYTHSLDGAGLFLFDHAAEEYEHAKKLIIFLNENNVPVQLTSISAPEHKFEGLTQIFQKAYEHEQHISESINNIVDHAIKSKDHATFNFLQWYVAEQHEEEVLFKDILDKIELIGNENHGLYLADQYVKGIAKSRKS

SEQ ID NO: 255 - protein, 824 aa, synthetic construct
MPMGSLQPLATLYLLGMLVASVLAAENLWVTVYYGVPVWKEAKTTLFCASDARAYEKEVHNVWATHACVPTDPSPQELVLGNVTENFNMWKNDMVDQMHEDIISLWDQSLKPCVKLTPLCVTLICSDATVKTGTVEEMKNCSFNTTTEIRDKKKKEYALFYKPDIVPLSETNNTSEYRLINCNTSACTQACPKVTFEPIPIHYCAPAGYAILKCNNETFNGTGPCSNVSTVQCTHGIRPVVSTQLLLNGSLAEKEIVIRSENLTNNAKIIIVHLNTSVEIVCTRPNNNTRKSVRIGPGQTFYATGDIIGDIKQAHCNISEEKWNDTLQKVGIELQKHFPNKTIKYNQSAGGDMEITTHSFNCGGEFFYCNTSNLFNGTYNGTYISTNSSANSTSTITLQCRIKQIINMWQGVGRCMYAPPIAGNITCRSNITGLLLTRDGGTNSNETETFRPAGGDMRDNWRSELYKYKVVKIEPLGVAPTRCKRRVVGRRRRRRAVGIGAVFLGFLGAAGSTMGAASMTLTVQARNLLSGIVQQQSNLLRAPEAQQHLLKLTVWGIKQLQARVLAVERYLRDQQLLGIWGCSGKLICCTNVPWNSSWSNRNLSEIWDNMTWLQWDKEISNYTQIIYGLLEESQNQQEKNEQDLLALDGGGSGGGGSGLSKDIIKLLNEQVNKEMNSSNLYMSMSSWCYTHSLDGAGLFLFDHAAEEYEHAKKLIIFLNENNVPVQLTSISAPEHKFEGLTQIFQKAYEHEQHISESINNIVDHAIKSKDHATFNFLQWYVAEQHEEEVLFKDILDKIELIGNENHGLYLADQYVKGIAKSRKS

SEQ ID NO: 256 - protein, 819 aa, synthetic construct
MPMGSLQPLATLYLLGMLVASVLAAENLWVTVYYGVPVWKEAKTTLFCASDARAYEKEVHNVWATHACVPTDPSPQELVLGNVTENFNMWKNDMVDQMHEDIISLWDQSLKPCVKLTPLCVTLICSDATVKTGTVEEMKNCSFNTTTEIRDKKKKEYALFYKPDIVPLSETNNTSEYRLINCNTSACTQACPKVTFEPIPIHYCAPAGYAILKCNNETFNGTGPCSNVSTVQCTHGIRPVVSTQLLLNGSLAEKEIVIRSENLTNNAKIIIVHLNTSVEIVCTRPNNNTRKSVRIGPGQTFYATGDIIGDIKQAHCNISEEKWNDTLQKVGIELQKHFPNKTIKYNQSAGGDMEITTHSFNCGGEFFYCNTSNLFNGTYNGTYISTNSSANSTSTITLQCRIKQIINMWQGVGRCMYAPPIAGNITCRSNITGLLLTRDGGTNSNETETFRPAGGDMRDNWRSELYKYKVVKIEPLGVAPTRCKRRVVGRRRRRRAVGIGAVFLGFLGAAGSTMGAASMTLTVQARNLLSGIVQQQSNLLRAPEAQQHLLKLTVWGIKQLQARVLAVERYLRDQQLLGIWGCSGKLICCTNVPWNSSWSNRNLSEIWDNMTWLQWDKEISNYTQIIYGLLEESQNQQEKNEQDLLALDGGGSGLSKDIIKLLNEQVNKEMNSSNLYMSMSSWCYTHSLDGAGLFLFDHAAEEYEHAKKLIIFLNENNVPVQLTSISAPEHKFEGLTQIFQKAYEHEQHISESINNIVDHAIKSKDHATFNFLQWYVAEQHEEEVLFKDILDKIELIGNENHGLYLADQYVKGIAKSRKS

SEQ ID NO: 257 - DNA, 1989 bp, synthetic construct; identical to SEQ ID NO: 224
  source 1..1989: mol_type = other DNA

SEQ ID NO: 258 - DNA, 2475 bp, synthetic construct
  source 1..2475: mol_type = other DNA
gtcgacgccaccatgcctatgggatctctgcagcctctggccacactgtacctgctgggaatgctggtggcttctgtgctggccgccgagaatctgtgggtcacagtgtactatggcgtgcccgtgtggaaagaggccaagaccacactgttctgtgccagcgacgccaaggcctacaagaaagaggtgcacaacatctgggccacacacgcctgcgtgccaaccgatccatctcctcaagagctgttcctggaaaacgtgaccgagaacttcaacatgtggaagaacgacatggtggaccagatgcacgaggacatcatcagcctgtgggaccagagcctgaagccttgcgtgaagctgacccctctgtgcgtgaccctgatctgtagcaccgccaccgtgaacaacagagccgtggacgagatgaagaactgcagcttcaacaccaccaccgagatccgggacaagaagaagaaagagtacgccctgttctatcggagcgacgtggtgcccctggacgagacaaacaacaccagcgagtaccggctgatcaactgcaacacctccgccatcaccatggtctgccccaagctgaccttcgagcccattcctatccactactgtgcccctgccggctacgccatcctgaagtgcaacgacgagacattcaacggcacaggcccctgcagcaatgtgtccaccgtgcagtgtacccacggcatcagacctgtgctgagcacacagctgctgctgaatggaagcctggccgagaaagaaatcgtgatcagaagcgagaacctgaccaacaacgccaagatcatcattgtgcatctgcacacccctgtggaaatcgtgtgcacccggcctctgaatctgaccagaaagagcgtgcggatcggccctggccagaccttttatgccatgggcgacatcatcggcgatatcaagcaggcccactgcaacatcagcgaggaaaagtggaacgagacactgcagaaagtgggcatcgagctgcagaagcacttccccaacaagaccatcaagtacaaccagagcgctggcggcgacatggaaatcaccacacacagcttcaattgtggcggcgagttcttctactgcaataccagcaagctgttcaacagcacctacaacggcacctatatcagcaccaactccaccaatagcaccagctacatcaccctgcagtgccggatcaagatgatcattaacatgtggcaaggcgtcggcagggctatgtacgcccctcctatcgccggcaacatcacctgtcggagcaatatcacaggcctgctgctcaccagagatggcggcatcaacaacgtgtccaacgagacagaaaccttccggcctgccggcggagacatgagagacaattggagaagcgagctgtacaagtacaaggtggtcaagatcgagcccctgggcgtcgcaccaacacggtgcaagagaagagtcgtgggccgtcgtagaaggcggagagccgttggaattggcgccgtgttcctgggctttctgggagccgctggatctacaatgggcgctgccagcatgaccctgacagtgcaggctagaaatctgctgagcggcatcgtgcagcagcagagcaatctgctcagagcccctgaggctcagcagcacctcctgaaactgacagtgtggggcatcaagcagctgcaggcaagagtgctggcagtggaaagatacctgcgggaccagcagctcctcggaatctggggatgtagcggcaagctgatctgctgcaccaacgtgccctggaacagcagctggtccaaccggaatctgagcgagatctgggataacatgacctggctgcagtgggacaaagagatcagcaactacacccagatcatctacggcctgctggaagagagccagaaccagcaagagaaaaacgagcaggacctgctggcccttgatggtggtggaagcggagatatcatcaagctgctgaacgagcaagtgaacaaagaaatgaacagctccaacctgtacatgagcatgtccagctggtgttacacccacagcctggatggcgccggactgttcctgtttgatcacgccgccgaggaatacgagcacgccaagaagctgatcattttcctgaacgagaacaacgtgccagtgcagctgaccagcatctctgcccctgagcacaagttcgagggcctgacacagatctttcagaaggcctacgaacacgagcagcacatctccgagtccatcaacaatatcgtggaccacgccatcaagagcaaggatcacgccaccttcaactttctccagtggtacgtggccgaacagcacgaggaagaagtgctgttcaaggacatcctggacaagattgagctgatcggcaacgagaaccacggcctgtatctggccgaccagtacgtgaagggaatcgccaagagccggaagtcctgatgaggatcc

SEQ ID NO: 259 - DNA, 2475 bp, synthetic construct
  source 1..2475: mol_type = other DNA
gtcgacgccaccatgcccatgggatctctgcaacctctggccacactgtacctgctgggaatgctggtggcttctgtgctggccgccgagaatctgtgggtcacagtgtactatggcgtgcccgtgtggaaagaggccaagaccacactgttctgtgccagcgacgccaaggcctacaagaaagaggtgcacaacgtctgggccacacacgcctgtgtgcctaccgatccatctcctcaagagctgttcctggaaaacgtgaccgagaacttcaacatgtggaagaacgacatggtggaccagatgcacgaggacatcatcagcctgtgggaccagagcctgaagccttgcgtgaagctgacccctctgtgcgtgaccctgatctgtagcaccgccaccgtgaacaacagagccgtggacgagatgaagaactgcagcttcaacaccaccaccgagatccgggacaagaagaagaaagagtacgccctgttctatcggagcgacgtggtgcccctggacgagacaaacaacaccagcgagtaccggctgatcaactgcaacacctccgcctgcactcaggcctgtcctaaagtgaccttcgagcccattcctatccactactgtgcccctgccggctacgccatcctgaagtgcaacgacgagacattcaacggcacaggcccctgcagcaatgtgtccaccgtgcagtgtacccacggcatcagaccagtggtgtctacccagctgctgctgaatggaagcctggccgagaaagaaatcgtgatcagaagcgagaacctgaccaacaacgccaagatcatcattgtgcatctgcacacccctgtggaaatcgtgtgcacccggcctaacaacaacacccggaagtctgtgcggatcggccctggccagacattctatgccaccggcgatatcatcggcgacatcaagcaggcccactgcaacatcagcgaggaaaagtggaacgagacactgcagaaagtgggcatcgagctgcagaagcacttccccaacaagaccatcaagtacaaccagagcgctggcggcgacatggaaatcaccacacacagcttcaattgtggcggcgagttcttctactgcaataccagcaagctgttcaacagcacctacaacggcacctatatcagcaccaactccaccaatagcaccagctacatcaccctgcagtgccggatcaagcagatcatcaatatgtggcaaggcgtcggccggtgtatgtacgcccctcctatcgccggcaacatcacctgtcggagcaatatcacaggcctgctgctcaccagagatggcggcatcaacaacgtgtccaacgagacagaaaccttccggcctgccggcggagacatgagagacaattggagaagcgagctgtacaagtacaaggtggtcaagatcgagcccctgggcgtcgcaccaacacggtgcaagagaagagtcgtgggccgtcgtagaaggcggagagccgttggaattggcgccgtgttcctgggctttctgggagccgctggatctacaatgggcgctgccagcatgaccctgacagtgcaggctagaaatctgctgagcggcatcgtgcagcagcagagcaatctgctcagagcccctgaggctcagcagcacctcctgaaactgacagtgtggggaatcaagcagctgcaggccagagtgctggcagtggaaagatacctgagggaccagcagctcctcggaatctggggatgtagcggcaagctgatctgctgcaccaacgtgccctggaactccagctggtccaaccggaatctgagcgagatctgggataacatgacctggctgcagtgggacaaagagatcagcaactacacccagatcatctacggcctgctggaagagagccagaaccagcaagagaaaaacgagcaggacctgctggccctggacggcggaggatctggcgacattatcaagctgctgaacgagcaagtgaacaaagagatgaacagctccaacctgtacatgagcatgagcagctggtgttacacccacagccttgatggcgccggactgttcctgtttgatcacgccgccgaggaatacgagcacgccaagaagctgatcatcttcctgaacgagaacaatgtgcccgtgcagctgaccagcattagcgccccagagcacaagttcgagggcctgacacagatctttcagaaggcctacgaacacgagcagcacatctccgagagcatcaacaacatcgtggaccacgccattaagagcaaggatcacgccaccttcaattttctgcagtggtacgtggccgaacagcacgaggaagaagtgctgttcaaggacatcctggacaagattgagctgatcggcaacgagaaccacggcctgtatctggccgaccagtacgtgaagggaatcgccaagagccggaagtcctgataaggatcc

SEQ ID NO: 260 - DNA, 2562 bp, synthetic construct
  source 1..2562: mol_type = other DNA
gtcgacgccaccatgcctatgggatctctgcagcctctggccacactgtacctgctgggaatgctggtggcttctgtgctggccgagggcaatctgtgggtcacagtgtactatggcgtgcccgtgtggaaagaggccaagaccacactgttctgtgccagcgacgccaaggcctacaagaaagaggtggccaacgtctgggccacacacgcctgtgttcctaccgatccatctcctcaagagctgttcctggaaaacgtgaccgagaacttcaacatgtggaagaacgacatggtggaccagatgcacgaggacatcatcagcctgtgggaccagagcctgaagccttgcgtgaagctgacccctctgtgcgtgaccctgatctgtagcaccgccaccgtgaacaacagagccgtggacgagatgaagaactgcagcttcaacaccaccaccgagatccgggacaagaagaagaaagagtacgccctgttctatcggagcgacgtggtgcccctggacgagacaaacaacaccagcgagtaccggctgatcaactgcaacacctccgccgtgacacaggcttgccccaaagtgaccttcgagcccattcctatccactactgtgcccctgccggctacgccatcctgaagtgcaacgacgagacattcaacggcacaggcccctgcagcaatgtgtccaccgtgcagtgtacccacggcatcagaccagtggtgtctacccagctgctgctgaatggaagcctggccgagaaagaaatcgtgatcagaagcgagaacctgaccaacaacgccaagatcatcattgtgcatctgcacacccctgtggaaatcgtgtgcacccggcctaacaacaacacccggaagtctgtgcggatcggccctggccagacattctatgccaccggcgatatcatcggcgacatcaagcaggcccactgcaacatcagcgaggaaaagtggaacgagacactgcagaaagtgggcatcgagctgcagaagcacttccccaacaagaccatcaagtacaaccagagcgctggcggcgacatggaaatcaccacacacagcttcaattgtggcggcgagttcttctactgcaataccagcaagctgttcaacagcacctacaacggcacctatatcagcaccaactccaccaatagcaccagctacatcaccctgcagtgccggatcaagcagatcatcaatatgtggcaaggcgtgggcagagctatgtacgcccctcctatcgccggcaacatcacctgtcggagcaatatcacaggcctgctgctcaccagagatggcggcatcaacaacgtgtccaacgagacagaaaccttccggcctgccggcggagacatgagagacaattggagaagcgagctgtacaagtacaaggtggtggaagtgcagcccctgggaatcgctccaacaggcgctaagagaagagtggtggaacgcgagaaaagagccgctggactgggagccctgtttctgggttttctgggagccgccggaagcacaatgggagctgcctctatcacactgaccgtgcaggctagacagctgctgagcggaattgtgcagcagcagagcaacctgctgagagccattgaagcccagcagcacatgctgcagctgaccgtgtggggaatcaaacagctgcaggccagagtgctgaccctggaaagatacgccaaggaccagcagctcctcggcatgtggggatgttctggcaagctgatctgcaccaccaacgtgccctggaacacctcctggtccaacaagagcgagatggacatctggaacaacatgacctggatgcagtgggagagagagatcagcaactacaccgagacaatctacatgctgctcgaggacagccagcggcagcaagagagaaacgagaaggatctgctggccctggactcctggaatagcctgtggaactggttcaatatcaccaactggctgtggtacatcaagatcttcatcatgatcgtcggcggcctgatcggcctgagaatcgtgtttgccgtgctgagcatcgtgaacagagtgcggcagggaatcagcccactgagcctgcaaaccctgacacctaatcctagagagcccgaccggctgagaggcatcgaagaagaaggcggcgagcaggacagagacagatccatcagactggtgtccggcttcctgcctatcgtgtgggacgatctgagaagcctgtgcctgttcagctaccaccggctgcgggattttctgctgcttgccgccagagtggttgaactgctgggacacagctctctgcggggactgcaaagaggctgggaagtcctgaagtacctgggcagcctggtgcagtattggggcctcgagctgaagagaagcgccattagcctgttcgacaccctggccattgctgtggccgaaggcaccgacagaatcattgagctgatccagggcttctgccgggccatcagaaacatccctaccagaatccggcagggcttcgaggcttccctgctgtgataaggatcc

SEQ ID NO: 261 - protein, 655 aa, synthetic construct; identical to SEQ ID NO: 223

SEQ ID NO: 262 - protein, 817 aa, synthetic construct
MPMGSLQPLATLYLLGMLVASVLAAENLWVTVYYGVPVWKEAKTTLFCASDAKAYKKEVHNIWATHACVPTDPSPQELFLENVTENFNMWKNDMVDQMHEDIISLWDQSLKPCVKLTPLCVTLICSTATVNNRAVDEMKNCSFNTTTEIRDKKKKEYALFYRSDVVPLDETNNTSEYRLINCNTSAITMVCPKLTFEPIPIHYCAPAGYAILKCNDETFNGTGPCSNVSTVQCTHGIRPVLSTQLLLNGSLAEKEIVIRSENLTNNAKIIIVHLHTPVEIVCTRPLNLTRKSVRIGPGQTFYAMGDIIGDIKQAHCNISEEKWNETLQKVGIELQKHFPNKTIKYNQSAGGDMEITTHSFNCGGEFFYCNTSKLFNSTYNGTYISTNSTNSTSYITLQCRIKMIINMWQGVGRAMYAPPIAGNITCRSNITGLLLTRDGGINNVSNETETFRPAGGDMRDNWRSELYKYKVVKIEPLGVAPTRCKRRVVGRRRRRRAVGIGAVFLGFLGAAGSTMGAASMTLTVQARNLLSGIVQQQSNLLRAPEAQQHLLKLTVWGIKQLQARVLAVERYLRDQQLLGIWGCSGKLICCTNVPWNSSWSNRNLSEIWDNMTWLQWDKEISNYTQIIYGLLEESQNQQEKNEQDLLALDGGGSGDIIKLLNEQVNKEMNSSNLYMSMSSWCYTHSLDGAGLFLFDHAAEEYEHAKKLIIFLNENNVPVQLTSISAPEHKFEGLTQIFQKAYEHEQHISESINNIVDHAIKSKDHATFNFLQWYVAEQHEEEVLFKDILDKIELIGNENHGLYLADQYVKGIAKSRKS

SEQ ID NO: 263 - protein, 817 aa, synthetic construct
MPMGSLQPLATLYLLGMLVASVLAAENLWVTVYYGVPVWKEAKTTLFCASDAKAYKKEVHNVWATHACVPTDPSPQELFLENVTENFNMWKNDMVDQMHEDIISLWDQSLKPCVKLTPLCVTLICSTATVNNRAVDEMKNCSFNTTTEIRDKKKKEYALFYRSDVVPLDETNNTSEYRLINCNTSACTQACPKVTFEPIPIHYCAPAGYAILKCNDETFNGTGPCSNVSTVQCTHGIRPVVSTQLLLNGSLAEKEIVIRSENLTNNAKIIIVHLHTPVEIVCTRPNNNTRKSVRIGPGQTFYATGDIIGDIKQAHCNISEEKWNETLQKVGIELQKHFPNKTIKYNQSAGGDMEITTHSFNCGGEFFYCNTSKLFNSTYNGTYISTNSTNSTSYITLQCRIKQIINMWQGVGRCMYAPPIAGNITCRSNITGLLLTRDGGINNVSNETETFRPAGGDMRDNWRSELYKYKVVKIEPLGVAPTRCKRRVVGRRRRRRAVGIGAVFLGFLGAAGSTMGAASMTLTVQARNLLSGIVQQQSNLLRAPEAQQHLLKLTVWGIKQLQARVLAVERYLRDQQLLGIWGCSGKLICCTNVPWNSSWSNRNLSEIWDNMTWLQWDKEISNYTQIIYGLLEESQNQQEKNEQDLLALDGGGSGDIIKLLNEQVNKEMNSSNLYMSMSSWCYTHSLDGAGLFLFDHAAEEYEHAKKLIIFLNENNVPVQLTSISAPEHKFEGLTQIFQKAYEHEQHISESINNIVDHAIKSKDHATFNFLQWYVAEQHEEEVLFKDILDKIELIGNENHGLYLADQYVKGIAKSRKS

SEQ ID NO: 264 - protein, 846 aa, synthetic construct
MPMGSLQPLATLYLLGMLVASVLAEGNLWVTVYYGVPVWKEAKTTLFCASDAKAYKKEVANVWATHACVPTDPSPQELFLENVTENFNMWKNDMVDQMHEDIISLWDQSLKPCVKLTPLCVTLICSTATVNNRAVDEMKNCSFNTTTEIRDKKKKEYALFYRSDVVPLDETNNTSEYRLINCNTSAVTQACPKVTFEPIPIHYCAPAGYAILKCNDETFNGTGPCSNVSTVQCTHGIRPVVSTQLLLNGSLAEKEIVIRSENLTNNAKIIIVHLHTPVEIVCTRPNNNTRKSVRIGPGQTFYATGDIIGDIKQAHCNISEEKWNETLQKVGIELQKHFPNKTIKYNQSAGGDMEITTHSFNCGGEFFYCNTSKLFNSTYNGTYISTNSTNSTSYITLQCRIKQIINMWQGVGRAMYAPPIAGNITCRSNITGLLLTRDGGINNVSNETETFRPAGGDMRDNWRSELYKYKVVEVQPLGIAPTGAKRRVVEREKRAAGLGALFLGFLGAAGSTMGAASITLTVQARQLLSGIVQQQSNLLRAIEAQQHMLQLTVWGIKQLQARVLTLERYAKDQQLLGMWGCSGKLICTTNVPWNTSWSNKSEMDIWNNMTWMQWEREISNYTETIYMLLEDSQRQQERNEKDLLALDSWNSLWNWFNITNWLWYIKIFIMIVGGLIGLRIVFAVLSIVNRVRQGISPLSLQTLTPNPREPDRLRGIEEEGGEQDRDRSIRLVSGFLPIVWDDLRSLCLFSYHRLRDFLLLAARVVELLGHSSLRGLQRGWEVLKYLGSLVQYWGLELKRSAISLFDTLAIAVAEGTDRIIELIQGFCRAIRNIPTRIRQGFEASLL

SEQ ID NO: 265 - DNA, 2223 bp, synthetic construct
  source 1..2223: mol_type = other DNA
gtcgacgccaccatgcctatgggatctctgcagcctctggccacactgtacctgctgggaatgctggtggcttctgtgctggccgagggcaatctgtgggtcacagtgtactatggcgtgcccgtgtggaaagaggccaagaccacactgttctgtgccagcgacgccaaggcctacaagaaagaggtggccaacgtctgggccacacacgcctgtgttcctaccgatccatctcctcaagagctgttcctggaaaacgtgaccgagaacttcaacatgtggaagaacgacatggtggaccagatgcacgaggacatcatcagcctgtgggaccagagcctgaagccttgcgtgaagctgacccctctgtgcgtgaccctgatctgtagcaccgccaccgtgaacaacagagccgtggacgagatgaagaactgcagcttcaacaccaccaccgagatccgggacaagaagaagaaagagtacgccctgttctatcggagcgacgtggtgcccctggacgagacaaacaacaccagcgagtaccggctgatcaactgcaacacctccgccgtgacacaggcttgccccaaagtgaccttcgagcccattcctatccactactgtgcccctgccggctacgccatcctgaagtgcaacgacgagacattcaacggcacaggcccctgcagcaatgtgtccaccgtgcagtgtacccacggcatcagaccagtggtgtctacccagctgctgctgaatggaagcctggccgagaaagaaatcgtgatcagaagcgagaacctgaccaacaacgccaagatcatcattgtgcatctgcacacccctgtggaaatcgtgtgcacccggcctaacaacaacacccggaagtctgtgcggatcggccctggccagacattctatgccaccggcgatatcatcggcgacatcaagcaggcccactgcaacatcagcgaggaaaagtggaacgagacactgcagaaagtgggcatcgagctgcagaagcacttccccaacaagaccatcaagtacaaccagagcgctggcggcgacatggaaatcaccacacacagcttcaattgtggcggcgagttcttctactgcaataccagcaagctgttcaacagcacctacaacggcacctatatcagcaccaactccaccaatagcaccagctacatcaccctgcagtgccggatcaagcagatcatcaatatgtggcaaggcgtgggcagagctatgtacgcccctcctatcgccggcaacatcacctgtcggagcaatatcacaggcctgctgctcaccagagatggcggcatcaacaacgtgtccaacgagacagaaaccttccggcctgccggcggagacatgagagacaattggagaagcgagctgtacaagtacaaggtggtggaagtgcagcccctgggaatcgctccaacaggcgctaagagaagagtggtggaacgcgagaaaagagccgctggactgggagccctgtttctgggttttctgggagccgccggaagcacaatgggagctgcctctatcacactgaccgtgcaggctagacagctgctgagcggaattgtgcagcagcagagcaacctgctgagagccattgaagcccagcagcacatgctgcagctgaccgtgtggggaatcaaacagctgcaggccagagtgctgaccctggaaagatacgccaaggaccagcagctcctcggcatgtggggatgttctggcaagctgatctgcaccaccaacgtgccctggaacacctcctggtccaacaagagcgagatggacatctggaacaacatgacctggatgcagtgggagagagagatcagcaactacaccgagacaatctacatgctgctcgaggacagccagcggcagcaagagagaaacgagaaggatctgctggccctggactcctggaatagcctgtggaactggttcaatatcaccaactggctgtggtacatcaagatcttcatcatgatcgtcggcggcctgatcggcctgagaatcgtgtttgccgtgctgagcatcgtgaacagagtgcggcagggaatcagcccactgagcctgcaaaccctgacacctaatcctagagagcccgaccggctgagaggcatcgaagaagaaggcggcgagcaggacagagacagatccatcagactggtgtcctgataaggatcc

SEQ ID NO: 266 - DNA, 2109 bp, synthetic construct
  source 1..2109: mol_type = other DNA
gtcgacgccaccatgcctatgggatctctgcagcctctggccacactgtacctgctgggaatgctggtggcttctgtgctggccgagggcaatctgtgggtcacagtgtactatggcgtgcccgtgtggaaagaggccaagaccacactgttctgtgccagcgacgccaaggcctacaagaaagaggtggccaacgtctgggccacacacgcctgtgttcctaccgatccatctcctcaagagctgttcctggaaaacgtgaccgagaacttcaacatgtggaagaacgacatggtggaccagatgcacgaggacatcatcagcctgtgggaccagagcctgaagccttgcgtgaagctgacccctctgtgcgtgaccctgatctgtagcaccgccaccgtgaacaacagagccgtggacgagatgaagaactgcagcttcaacaccaccaccgagatccgggacaagaagaagaaagagtacgccctgttctatcggagcgacgtggtgcccctggacgagacaaacaacaccagcgagtaccggctgatcaactgcaacacctccgccgtgacacaggcttgccccaaagtgaccttcgagcccattcctatccactactgtgcccctgccggctacgccatcctgaagtgcaacgacgagacattcaacggcacaggcccctgcagcaatgtgtccaccgtgcagtgtacccacggcatcagaccagtggtgtctacccagctgctgctgaatggaagcctggccgagaaagaaatcgtgatcagaagcgagaacctgaccaacaacgccaagatcatcattgtgcatctgcacacccctgtggaaatcgtgtgcacccggcctaacaacaacacccggaagtctgtgcggatcggccctggccagacattctatgccaccggcgatatcatcggcgacatcaagcaggcccactgcaacatcagcgaggaaaagtggaacgagacactgcagaaagtgggcatcgagctgcagaagcacttccccaacaagaccatcaagtacaaccagagcgctggcggcgacatggaaatcaccacacacagcttcaattgtggcggcgagttcttctactgcaataccagcaagctgttcaacagcacctacaacggcacctatatcagcaccaactccaccaatagcaccagctacatcaccctgcagtgccggatcaagcagatcatcaatatgtggcaaggcgtgggcagagctatgtacgcccctcctatcgccggcaacatcacctgtcggagcaatatcacaggcctgctgctcaccagagatggcggcatcaacaacgtgtccaacgagacagaaaccttccggcctgccggcggagacatgagagacaattggagaagcgagctgtacaagtacaaggtggtggaagtgcagcccctgggaatcgctccaacaggcgctaagagaagagtggtggaacgcgagaaaagagccgctggactgggagccctgtttctgggttttctgggagccgccggaagcacaatgggagctgcctctatcacactgaccgtgcaggctagacagctgctgagcggaattgtgcagcagcagagcaacctgctgagagccattgaagcccagcagcacatgctgcagctgaccgtgtggggaatcaaacagctgcaggccagagtgctgaccctggaaagatacgccaaggaccagcagctcctcggcatgtggggatgttctggcaagctgatctgcaccaccaacgtgccctggaacacctcctggtccaacaagagcgagatggacatctggaacaacatgacctggatgcagtgggagagagagatcagcaactacaccgagacaatctacatgctgctcgaggacagccagcggcagcaagagagaaacgagaaggatctgctggccctggactcctggaatagcctgtggaactggttcaatatcaccaactggctgtggtacatcaagatcttcatcatgatcgtcggcggcctgatcggcctgagaatcgtgtttgccgtgctgagcatcgtgaacagagtgcggcagggatactgataaggatcc

SEQ ID NO: 267 - DNA, 2475 bp, synthetic construct
  source 1..2475: mol_type = other DNA
gtcgacgccaccatgggatctctgcaacctctggccacactgtacctgctgggaatgctggtggcttctgtgctggccgccgagaatctgtgggtcacagtgtactatggcgtgcccgtgtggaaagaggccaagaccacactgttctgtgccagcgacgccaaggcctacaagaaagaggtgcacaacgtctgggccacacacgcctgtgtgcctaccgatccatctcctcaagagctgttcctggaaaacgtgaccgagaacttcaacatgtggaagaacgacatggtggaccagatgcacgaggacatcatcagcctgtggtgccagagcctgaagccttgcgtgaagctgacccctctgtgcgtgaccctgatctgtagcaccgccaccgtgaacaacagagccgtggacgagatgaagaactgcagcttcaacaccaccaccgagatccgggacaagaagaagaaagagtacgccctgttctatcggagcgacgtggtgcccctggacgagacaaacaacaccagcgagtaccggctgatcaactgcaacacctccgccgtgactcaggcctgtcctaaagtgaccttcgagcccattcctatccactactgtgcccctgccggctacgccatcctgaagtgcaacaacgagacattcaacggcacaggcccctgcagcaatgtgtccaccgtgcagtgtacccacggcatcagaccagtggtgtctacccagctgctgctgaatggaagcctggccgagaaagaaatcgtgatcagaagcgagaacctgaccaacaacgccaagatcatcattgtgcatctgaacacctctgtggaaatcgtgtgcacccggcctaacaacaacacccggaagtctgtgcggatcggccctggccagacattctatgccaccggcgatatcatcggcgacatcaagcaggcccactgcaacatcagcgaggaaaagtggaacgagacactgcagaaagtgggcatcgagctgcagaagcacttccccaacaagaccatcaagtacaaccagagcgctggcggcgacatggaaatcaccacacacagcttcaattgtggcggcgagttcttctactgcaataccagcaagctgttcaacagcacctacaacggcacctatatcagcaccaactccaccaatagcaccagctacatcaccctgcagtgccggatcaagcagatcatcaatatgtggcaaggctgcggcgtcggccgggctatgtacgcccctcctatcgccggcaacatcacctgtcggagcaatatcacaggcctgctgctcaccagagatggcggcatcaacaacgtgtccaacgagacagaaaccttccggcctgccggcggagacatgagagacaattggagaagcgagctgtacaagtacaaggtggtcaagatcgagcccctgggcgtcgcaccaacacggtgcaagagaagagtcgtgggccgtcgtagaaggcggagagccgttggaattggcgccgtgttcctgggctttctgggagccgctggatctacaatgggcgctgccagcatgaccctgacagtgcaggctagaaatctgctgagcggcatcgtgcagcagcagagcaatctgctcagagcccctgaggctcagcagcacctcctgaaactgacagtgtggggaatcaagcagctgcaggccagagtgctggcagtggaaagatacctgagggaccagcagctcctcggaatctggggatgtagcggcaagctgatctgctgcaccaacgtgccctggaactccagctggtccaaccggaatctgagcgagatctgggataacatgacctggctgcagtgggacaaagagatcagcaactacacccagatcatctacggcctgctggaagagagccagaaccagcaagagaaaaacgagcaggacctgctggccctggacggcggaggatctggcgacattatcaagctgctgaacgagcaagtgaacaaagagatgaacagctccaacctgtacatgagcatgagcagctggtgttacacccacagccttgatggcgccggactgttcctgtttgatcacgccgccgaggaatacgagcacgccaagaagctgatcatcttcctgaacgagaacaatgtgcccgtgcagctgaccagcattagcgccccagagcacaagttcgagggcctgacacagatctttcagaaggcctacgaacacgagcagcacatctccgagagcatcaacaacatcgtggaccacgccattaagagcaaggatcacgccaccttcaattttctgcagtggtacgtggccgaacagcacgaggaagaagtgctgttcaaggacatcctggacaagattgagctgatcggcaacgagaaccacggcctgtatctggccgaccagtacgtgaagggaatcgccaagagccggaagtcctgataaggatcc

SEQ ID NO: 268 - DNA, 2469 bp, synthetic construct
  source 1..2469: mol_type = other DNA
gtcgacgccaccatgggatctctgcaacctctggccacactgtacctgctgggaatgctggtggcttctgtgctggccgccgagaatctgtgggtcacagtgtactatggcgtgcccgtgtggaaagaggcctgcaccacactgttctgtgccagcgacgccaaggcctacaagaaaaaggtgcggaacgtctgggccacacactgctgtgtgcctaccgatccatctcctcaagagctgttcctggaaaacgtgaccgagaacttcaacatgtggaagaacgacatggtggaccagatgcacgaggacatcatcagcctgtgggaccagagcctgaagccttgcgtgaagctgacccctctgtgcgtgaccctgatctgtagcaccgccaccgtgaacaacagagccgtggacgagatgaagaactgcagcttcaacaccaccaccgagatccgggacaagaagaagaaagagtacgccctgttctatcggagcgacgtggtgcccctggacgagacaaacaacaccagcgagtaccggctgatcaactgcaacacctccgcctgcactcaggcctgtcctaaagtgaccttcgagcccattcctatccactactgtgcccctgccggctacgccatcctgaagtgcaacaacgagacattcaacggcacaggcccctgcagcaatgtgtccaccgtgcagtgtacccacggcatcagaccagtggtgtctacccagctgctgctgaatggaagcctggccgagaaagaaatcgtgatcagaagcgagaacctgaccaacaacgccaagatcatcattgtgcatctgaacacctctgtggaaatcgtgtgcacccggcctaacaacaacacccggaagtctgtgcggatcggccctggccagtggttctatgccaccggcgatatcatcggcgacatcaagcaggcccactgcaacatcagcgaggaaaagtggaacgagacactgcagaaagtgggcatcgagctgcagaagcacttccccaacaagaccatcaagtacaaccagagcgctggcggcgacatggaaatcaccacacacagcttcaattgtggcggcgagttcttctactgcaataccagcaagctgttcaacagcacctacaacggcacctatatcagcaccaactccaccaatagcaccagctacatcaccctgcagtgccggatcaagcagatcatcaatatgtggcaaggcgtcggccggtgtatgtacgcccctcctatcgccggcaacatcacctgtcggagcaatatcacaggcctgctgctcaccagagatggcggcatcaacaacgtgtccaacgagacagaaaccttccggcctgccggcggagacatgagagacaattggagaagcgagctgtacaagtacaaggtggtcaagatcgagcccctgggcgtcgcaccaacacggtgcaagagaagagtcgtgggccgtcgtagaaggcggagagccgttggaattggcgccgtgttcctgggctttctgggagccgctggatctacaatgggcgctgccagcatgaccctgacagtgcaggctagaaatctgctgagcggcatcgtgcagcagcagagcaattgcctcagagcccctgagtgccagcagcacctcctgaaactgacagtgtggggaatcaagcagctgcaggccagagtgctggcagtggaaagatacctgagggaccagcagctcctcggaatctggggatgtagcggcaagctgatctgctgcaccaacgtgccctggaactccagctggtccaaccggaatctgagcgagatctgggataacatgacctggctgcagtgggacaaagagatcagcaactacacccagatcatctacggcctgctggaagagagccagaaccagcaagagaaaaacgagcaggacctgctggccctggacggcggaggatctggcgacattatcaagctgctgaacgagcaagtgaacaaagagatgaacagctccaacctgtacatgagcatgagcagctggtgttacacccacagccttgatggcgccggactgttcctgtttgatcacgccgccgaggaatacgagcacgccaagaagctgatcatcttcctgaacgagaacaatgtgcccgtgcagctgaccagcattagcgccccagagcacaagttcgagggcctgacacagatctttcagaaggcctacgaacacgagcagcacatctccgagagcatcaacaacatcgtggaccacgccattaagagcaaggatcacgccaccttcaattttctgcagtggtacgtggccgaacagcacgaggaagaagtgctgttcaaggacatcctggacaagattgagctgatcggcaacgagaaccacggcctgtatctggccgaccagtacgtgaagggaatcgccaagagccggaagtcctgataaggatcc

SEQ ID NO: 269 - DNA, 2469 bp, synthetic construct
  source 1..2469: mol_type = other DNA
gtcgacgccaccatgggatctctgcaacctctggccacactgtacctgctgggaatgctggtggcttctgtgctggccgccgagaatctgtgggtcacagtgtactatggcgtgcccgtgtggaaagaggccaagaccacactgttctgtgccagcgacgccaaggcctacaagaaagaggtgcacaacatctgggccacacacgcctgtgtgcctaccgatccatctcctcaagagctgttcctggaaaacgtgaccgagaacttcaacatgtggaagaacgacatggtggaccagatgcacgaggacatcatcagcctgtgggaccagagcctgaagccttgcgtgaagctgacccctctgtgcgtgaccctgatctgtagcaccgccaccgtgaacaacagagccgtggacgagatgaagaactgcagcttcaacaccaccaccgagatccgggacaagaagaagaaagagtacgccctgttctatcggagcgacgtggtgcccctggacgagacaaacaacaccagcgagtaccggctgatcaactgcaacacctccgccgtgactatggtgtgtcctaaactgaccttcgagcccattcctatccactactgtgcccctgccggctacgccatcctgaagtgcaacaacgagacattcaacggcacaggcccctgcagcaatgtgtccaccgtgcagtgtacccacggcatcagaccagtgctgtctacccagctgctgctgaatggaagcctggccgagaaagaaatcgtgatcagaagcgagaacctgaccaacaacgccaagatcatcattgtgcatctgaacacctctgtggaaatcgtgtgcacccggcctctgaacctgacccggaagtctgtgcggatcggccctggccagacattctatgccatgggcgatatcatcggcgacatcaagcaggcccactgcaacatcagcgaggaaaagtggaacgagacactgcagaaagtgggcatcgagctgcagaagcacttccccaacaagaccatcaagtacaaccagagcgctggcggcgacatggaaatcaccacacacagcttcaattgtggcggcgagttcttctactgcaataccagcaagctgttcaacagcacctacaacggcacctatatcagcaccaactccaccaatagcaccagctacatcaccctgcagtgccggatcaagatgatcatcaatatgtggcaaggcgtcggccgggctatgtacgcccctcctatcgccggcaacatcacctgtcggagcaatatcacaggcctgctgctcaccagagatggcggcatcaacaacgtgtccaacgagacagaaaccttccggcctgccggcggagacatgagagacaattggagaagcgagctgtacaagtacaaggtggtcaagatcgagcccctgggcgtcgcaccaacacggtgcaagagaagagtcgtgggccgtcgtagaaggcggagagccgttggaattggcgccgtgttcctgggctttctgggagccgctggatctacaatgggcgctgccagcatgaccctgacagtgcaggctagaaatctgctgagcggcatcgtgcagcagcagagcaatctgctcagagcccctgaggctcagcagcacctcctgaaactgacagtgtggggaatcaagcagctgcaggccagagtgctggcagtggaaagatacctgagggaccagcagctcctcggaatctggggatgtagcggcaagctgatctgctgcaccaacgtgccctggaactccagctggtccaaccggaatctgagcgagatctgggataacatgacctggctgcagtgggacaaagagatcagcaactacacccagatcatctacggcctgctggaagagagccagaaccagcaagagaaaaacgagcaggacctgctggccctggacggcggaggatctggcgacattatcaagctgctgaacgagcaagtgaacaaagagatgaacagctccaacctgtacatgagcatgagcagctggtgttacacccacagccttgatggcgccggactgttcctgtttgatcacgccgccgaggaatacgagcacgccaagaagctgatcatcttcctgaacgagaacaatgtgcccgtgcagctgaccagcattagcgccccagagcacaagttcgagggcctgacacagatctttcagaaggcctacgaacacgagcagcacatctccgagagcatcaacaacatcgtggaccacgccattaagagcaaggatcacgccaccttcaattttctgcagtggtacgtggccgaacagcacgaggaagaagtgctgttcaaggacatcctggacaagattgagctgatcggcaacgagaaccacggcctgtatctggccgaccagtacgtgaagggaatcgccaagagccggaagtcctgataaggatcc

SEQ ID NO: 270 - DNA, 2469 bp, synthetic construct
  source 1..2469: mol_type = other DNA
gtcgacgccaccatgggatctctgcaacctctggccacactgtacctgctgggaatgctggtggcttctgtgctggccgccgagaatctgtgggtcacagtgtactatggcgtgcccgtgtggaaagaggcctgcaccacactgttctgtgccagcgacgccaaggcctacaagaaaaaggtgcggaacgtctgggccacacactgctgtgtgcctaccgatccatctcctcaagagctgttcctggaaaacgtgaccgagaacttcaacatgtggaagaacgacatggtggaccagatgcacgaggacatcatcagcctgtgggaccagagcctgaagccttgcgtgaagctgacccctctgtgcgtgaccctgatctgtagcaccgccaccgtgaacaacagagccgtggacgagatgaagaactgcagcttcaacaccaccaccgagatccgggacaagaagaagaaagagtacgccctgttctatcggagcgacgtggtgcccctggacgagacaaacaacaccagcgagtaccggctgatcaactgcaacacctccgccgtgactcaggcctgtcctaaagtgaccttcgagcccattcctatccactactgtgcccctgccggctacgccatcctgaagtgcaacaacgagacattcaacggcacaggcccctgcagcaatgtgtccaccgtgcagtgtacccacggcatcagaccagtggtgtctacccagctgctgctgaatggaagcctggccgagaaagaaatcgtgatcagaagcgagaacctgaccaacaacgccaagatcatcattgtgcatctgaacacctctgtggaaatcgtgtgcacccggcctaacaacaacacccggaagtctgtgcggatcggccctggccagtggttctatgccaccggcgatatcatcggcgacatcaagcaggcccactgcaacatcagcgaggaaaagtggaacgagacactgcagaaagtgggcatcgagctgcagaagcacttccccaacaagaccatcaagtacaaccagagcgctggcggcgacatggaaatcaccacacacagcttcaattgtggcggcgagttcttctactgcaataccagcaagctgttcaacagcacctacaacggcacctatatcagcaccaactccaccaatagcaccagctacatcaccctgcagtgccggatcaagcagatcatcaatatgtggcaaggcgtcggccgggctatgtacgcccctcctatcgccggcaacatcacctgtcggagcaatatcacaggcctgctgctcaccagagatggcggcatcaacaacgtgtccaacgagacagaaaccttccggcctgccggcggagacatgagagacaattggagaagcgagctgtacaagtacaaggtggtcaagatcgagcccctgggcgtcgcaccaacacggtgcaagagaagagtcgtgggccgtcgtagaaggcggagagccgttggaattggcgccgtgttcctgggctttctgggagccgctggatctacaatgggcgctgccagcatgaccctgacagtgcaggctagaaatctgctgagcggcatcgtgcagcagcagagcaattgcctcagagcccctgagtgccagcagcacctcctgaaactgacagtgtggggaatcaagcagctgcaggccagagtgctggcagtggaaagatacctgagggaccagcagctcctcggaatctggggatgtagcggcaagctgatctgctgcaccaacgtgccctggaactccagctggtccaaccggaatctgagcgagatctgggataacatgacctggctgcagtgggacaaagagatcagcaactacacccagatcatctacggcctgctggaagagagccagaaccagcaagagaaaaacgagcaggacctgctggccctggacggcggaggatctggcgacattatcaagctgctgaacgagcaagtgaacaaagagatgaacagctccaacctgtacatgagcatgagcagctggtgttacacccacagccttgatggcgccggactgttcctgtttgatcacgccgccgaggaatacgagcacgccaagaagctgatcatcttcctgaacgagaacaatgtgcccgtgcagctgaccagcattagcgccccagagcacaagttcgagggcctgacacagatctttcagaaggcctacgaacacgagcagcacatctccgagagcatcaacaacatcgtggaccacgccattaagagcaaggatcacgccaccttcaattttctgcagtggtacgtggccgaacagcacgaggaagaagtgctgttcaaggacatcctggacaagattgagctgatcggcaacgagaaccacggcctgtatctggccgaccagtacgtgaagggaatcgccaagagccggaagtcctgataaggatcc

SEQ ID NO: 271 - DNA, 2469 bp, synthetic construct
  source 1..2469: mol_type = other DNA
gtcgacgccaccatgggatctctgcaacctctggccacactgtacctgctgggaatgctggtggcttctgtgctggccgccgagaatctgtgggtcacagtgtactatggcgtgcccgtgtggaaagaggccaagaccacactgttctgtgccagcgacgccaaggcctacaagaaagaggtgcacaacgtctgggccacacacgcctgtgtgcctaccgatccatctcctcaagagctgttcctggaaaacgtgaccgagaacttcaacatgtggaagaacgacatggtggaccagatgcacgaggacatcatcagcctgtgggaccagagcctgaagccttgcgtgaagctgacccctctgtgcgtgaccctgatctgtagcaccgccaccgtgaacaacagagccgtggacgagatgaagaactgcagcttcaacaccaccaccgagatccgggacaagaagaagaaagagtacgccctgttctatcggagcgacgtggtgcccctggacgagacaaacaacaccagcgagtaccggctgatcaactgcaacacctccgcctgcactcaggcctgtcctaaagtgaccttcgagcccattcctatccactactgtgcccctgccggctacgccatcctgaagtgcaacaacgagacattcaacggcacaggcccctgcagcaatgtgtccaccgtgcagtgtacccacggcatcagaccagtggtgtctacccagctgctgctgaatggaagcctggccgagaaagaaatcgtgatcagaagcgagaacctgaccaacaacgccaagatcatcattgtgcatctgaacacctctgtggaaatcgtgtgcacccggcctaacaacaacacccggaagtctgtgcggatcggccctggccagacattctatgccaccggcgatatcatcggcgacatcaagcaggcccactgcaacatcagcgaggaaaagtggaacgagacactgcagaaagtgggcatcgagctgcagaagcacttccccaacaagaccatcaagtacaaccagagcgctggcggcgacatggaaatcaccacacacagcttcaattgtggcggcgagttcttctactgcaataccagcaagctgttcaacagcacctacaacggcacctatatcagcaccaactccaccaatagcaccagctacatcaccctgcagtgccggatcaagcagatcatcaatatgtggcaaggcgtcggccggtgtatgtacgcccctcctatcgccggcaacatcacctgtcggagcaatatcacaggcctgctgctcaccagagatggcggcatcaacaacgtgtccaacgagacagaaaccttccggcctgccggcggagacatgagagacaattggagaagcgagctgtacaagtacaaggtggtcaagatcgagcccctgggcgtcgcaccaacacggtgcaagagaagagtcgtgggccgtcgtagaaggcggagagccgttggaattggcgccgtgttcctgggctttctgggagccgctggatctacaatgggcgctgccagcatgaccctgacagtgcaggctagaaatctgctgagcggcatcgtgcagcagcagagcaatctgctcagagcccctgaggctcagcagcacctcctgaaactgacagtgtggggaatcaagcagctgcaggccagagtgctggcagtggaaagatacctgagggaccagcagctcctcggaatctggggatgtagcggcaagctgatctgctgcaccaacgtgccctggaactccagctggtccaaccggaatctgagcgagatctgggataacatgacctggctgcagtgggacaaagagatcagcaactacacccagatcatctacggcctgctggaagagagccagaaccagcaagagaaaaacgagcaggacctgctggccctggacggcggaggatctggcgacattatcaagctgctgaacgagcaagtgaacaaagagatgaacagctccaacctgtacatgagcatgagcagctggtgttacacccacagccttgatggcgccggactgttcctgtttgatcacgccgccgaggaatacgagcacgccaagaagctgatcatcttcctgaacgagaacaatgtgcccgtgcagctgaccagcattagcgccccagagcacaagttcgagggcctgacacagatctttcagaaggcctacgaacacgagcagcacatctccgagagcatcaacaacatcgtggaccacgccattaagagcaaggatcacgccaccttcaattttctgcagtggtacgtggccgaacagcacgaggaagaagtgctgttcaaggacatcctggacaagattgagctgatcggcaacgagaaccacggcctgtatctggccgaccagtacgtgaagggaatcgccaagagccggaagtcctgataaggatcc

SEQ ID NO: 272 - DNA, 2475 bp, synthetic construct
  source 1..2475: mol_type = other DNA
gtcgacgccaccatgcctatgggatctctgcagcctctggccacactgtacctgctgggaatgctggtggcttctgtgctggccgccgagaatctgtgggtcacagtgtactatggcgtgcccgtgtggaaagaggccaagaccacactgttctgtgccagcgacgccaaggcctacaagaaagaggtgcacaacatctgggccacacacgcctgcgtgccaaccgatccatctcctcaagagctgttcctggaaaacgtgaccgagaacttcaacatgtggaagaacgacatggtggaccagatgcacgaggacatcatcagcctgtgggaccagagcctgaagccttgcgtgaagctgacccctctgtgcgtgaccctgatctgtagcaccgccaccgtgaacaacagagccgtggacgagatgaagaactgcagcttcaacaccaccaccgagatccgggacaagaagaagaaagagtacgccctgttctatcggagcgacgtggtgcccctggacgagacaaacaacaccagcgagtaccggctgatcaactgcaacacctccgccgtgacacaagtgtgccccaagctgaccttcgagcccattcctatccactactgtgcccctgccggctacgccatcctgaagtgcaacaacgagacattcaacggcacaggcccctgcagcaatgtgtccaccgtgcagtgtacccacggcatcagacctgtgctgagcacacagctgctgctgaatggaagcctggccgagaaagaaatcgtgatcagaagcgagaacctgaccaacaacgccaagatcatcatcgtgcacctgaataccagcgtggaaatcgtgtgcacccggcctaacaacaacacccggaagtctgtgcggatcggccctggccagacattctatgccaccggcgatatcatcggcgacatcaagcaggcccactgcaacatcagcgaggaaaagtggaacgagacactgcagaaagtgggcatcgagctgcagaagcacttccccaacaagaccatcaagtacaaccagagcgctggcggcgacatggaaatcaccacacacagcttcaattgtggcggcgagttcttctactgcaataccagcaagctgttcaacagcacctacaacggcacctatatcagcaccaactccaccaatagcaccagctacatcaccctgcagtgccggatcaagcagatcatcaatatgtggcaaggcgtgggcagagctatgtacgcccctcctatcgccggcaacatcacctgtcggagcaatatcacaggcctgctgctcaccagagatggcggcatcaacaacgtgtccaacgaaaccgaaaccttccggcctgccggcggagacatgagagacaattggagaagcgagctgtacaagtacaaggtggtcaagatcgagcccctgggcgtcgcaccaacacggtgcaagagaagagtcgtgggacgtagacgaaggcggagagccgttggaatcggagccgtgttcctgggctttctgggagccgctggatctacaatgggcgctgccagcatgaccctgacagtgcaggctagaaatctgctgagcggcatcgtgcagcagcagagcaatctgctcagagcccctgaggctcagcagcacctcctgaaactgacagtgtggggaatcaagcagctgcaggccagagtgctggcagtggaaagatacctgagggaccagcagctcctcggaatctggggatgtagcggcaagctgatctgctgcaccaacgtgccctggaacagcagctggtccaaccggaatctgagcgagatctgggataacatgacctggctgcagtgggacaaagagatcagcaactacacccagatcatctacggcctgctggaagagagccagaaccagcaagagaaaaacgagcaggacctgctggccctggatggcggaggatctggcgacattatcaagctgctgaacgagcaagtgaacaaagaaatgaacagctccaacctgtacatgagcatgtccagctggtgttacacccacagccttgatggcgccggactgttcctgtttgatcacgccgccgaggaatacgagcacgccaagaagctgatcatcttcctgaacgagaacaatgtgcccgtgcagctgaccagcatctctgcccctgagcacaagttcgagggcctgacacagatctttcagaaggcctacgaacacgagcagcacatctccgagtccatcaacaatatcgtggaccacgccattaagagcaaggatcacgccaccttcaactttctccagtggtacgtggccgaacagcacgaggaagaagtgctgttcaaggacatcctggacaagattgagctgatcggcaacgagaaccacggcctgtatctggccgaccagtacgtgaagggaatcgccaagagccggaagtcctgatgaggatcc

SEQ ID NO: 273 - DNA, 2448 bp, synthetic construct
  source 1..2448: mol_type = other DNA
gtcgacgccaccatgcctatgggatctctgcagcctctggccacactgtacctgctgggaatgctggtggcttctgtgctggccgagggcaatctgtgggtcacagtgtactatggcgtgcccgtgtggaaagaggccaagaccacactgttctgtgccagcgacgccaaggcctacaagaaagaggtgcacaacgtctgggccacacacgcctgtgtgcctaccgatccatctcctcaagagctgttcctggaaaacgtgaccgagaacttcaacatgtggaagaacgacatggtggaccagatgcacgaggacatcatcagcctgtgggaccagagcctgaagccttgcgtgaagctgacccctctgtgcgtgaccctgatctgtagcaccgccaccgtgaacaacagagccgtggacgagatgaagaactgcagcttcaacaccaccaccgagatccgggacaagaagaagaaagagtacgccctgttctatcggagcgacgtggtgcccctggacgagacaaacaacaccagcgagtaccggctgatcaactgcaacacctccgcctgcactcaggcctgtcctaaagtgaccttcgagcccattcctatccactactgtgcccctgccggctacgccatcctgaagtgcaacaacgagacattcaacggcacaggcccctgcagcaatgtgtccaccgtgcagtgtacccacggcatcagaccagtggtgtctacccagctgctgctgaatggaagcctggccgagaaagaaatcgtgatcagaagcgagaacctgaccaacaacgccaagatcatcatcgtgcacctgaataccagcgtggaaatcgtgtgcacccggcctaacaacaacacccggaagtctgtgcggatcggccctggccagacattctatgccaccggcgatatcatcggcgacatcaagcaggcccactgcaacatcagcgaggaaaagtggaacgagacactgcagaaagtgggcatcgagctgcagaagcacttccccaacaagaccatcaagtacaaccagagcgctggcggcgacatggaaatcaccacacacagcttcaattgtggcggcgagttcttctactgcaataccagcaagctgttcaacagcacctacaacggcacctatatcagcaccaactccaccaatagcaccagctacatcaccctgcagtgccggatcaagcagatcatcaatatgtggcaaggcgtcggccggtgtatgtacgcccctcctatcgccggcaacatcacctgtcggagcaatatcacaggcctgctgctcaccagagatggcggcatcaacaacgtgtccaacgaaaccgaaaccttccggcctgccggcggagacatgagagacaattggagaagcgagctgtacaagtacaaggtggtggaagtgcagcccctgggaatcgctcctaccggctgcaagagaagagtggttgaaggcggcggaggatctggcggaggcggatctgctgttggaatcggagctgtgttcctgggctttctgggagccgccggatctacaatgggagctgccagcatgaccctgaccgtgcaggctagaaatctgctgagcggcaaccccgactggctgcctgatatgacagtgtggggaatcaagcagctgcaggccagagtgctggcagtggaaagatacctgagggaccagcagctcctcggaatctggggatgtagcggcaagctgatctgctgcaccaacgtgccctggaactccagctggtccaaccggaatctgagcgagatctgggataacatgacctggctgcagtgggacaaagagatcagcaactacacccagatcatctacggcctgctggaagagagccagaaccagcaagagaaaaacgagcaggacctgctggccctggatggcggaggaagcggagatatcatcaagctgctgaacgagcaagtgaacaaagaaatgaacagcagcaacctgtacatgagcatgagcagctggtgttacacccacagccttgatggcgccggactgttcctgtttgatcacgccgccgaggaatacgagcacgccaagaagctgatcatcttcctgaacgagaacaatgtgcccgtgcagctgaccagcatctctgcccctgagcacaagttcgagggcctgacacagatctttcagaaggcctacgaacacgagcagcacatctccgagtccatcaacaatatcgtggaccacgccattaagagcaaggatcacgccaccttcaactttctccagtggtacgtggccgaacagcacgaggaagaagtgctgttcaaggacatcctggacaagatcgagctgatcggcaacgagaaccacggcctgtatctggccgaccagtacgtgaagggaatcgccaagagccggaagtcctgatgaggatcc

SEQ ID NO: 274 - DNA, 2475 bp, synthetic construct
  source 1..2475: mol_type = other DNA
gtcgacgccaccatgcctatgggatctctgcagcctctggccacactgtacctgctgggaatgctggtggcttctgtgctggccgccgagaatctgtgggtcacagtgtactatggcgtgcccgtgtggaaagaggccaagaccacactgttctgtgccagcgacgccaaggcctacaagaaagaggtggccaacgtctgggccacacacgcctgtgttcctaccgatccatctcctcaagagctgttcctggaaaacgtgaccgagaacttcaacatgtggaagaacgacatggtggaccagatgcacgaggacatcatcagcctgtgggaccagagcctgaagccttgcgtgaagctgacccctctgtgcgtgaccctgatctgtagcaccgccaccgtgaacaacagagccgtggacgagatgaagaactgcagcttcaacaccaccaccgagatccgggacaagaagaagaaagagtacgccctgttctatcggagcgacgtggtgcccctggacgagacaaacaacaccagcgagtaccggctgatcaactgcaacacctccgccgtgacacaggcttgccccaaagtgaccttcgagcccattcctatccactactgtgcccctgccggctacgccatcctgaagtgcaacaacgagacattcaacggcacaggcccctgcagcaatgtgtccaccgtgcagtgtacccacggcatcagaccagtggtgtctacccagctgctgctgaatggaagcctggccgagaaagaaatcgtgatcagaagcgagaacctgaccaacaacgccaagatcatcatcgtgcacctgaataccagcgtggaaatcgtgtgcacccggcctaacaacaacacccggaagtctgtgcggatcggccctggccagacattctatgccaccggcgatatcatcggcgacatcaagcaggcccactgcaacatcagcgaggaaaagtggaacgagacactgcagaaagtgggcatcgagctgcagaagcacttccccaacaagaccatcaagtacaaccagagcgctggcggcgacatggaaatcaccacacacagcttcaattgtggcggcgagttcttctactgcaataccagcaagctgttcaacagcacctacaacggcacctatatcagcaccaactccaccaatagcaccagctacatcaccctgcagtgccggatcaagcagatcatcaatatgtggcaaggcgtgggcagagctatgtacgcccctcctatcgccggcaacatcacctgtcggagcaatatcacaggcctgctgctcaccagagatggcggcatcaacaacgtgtccaacgaaaccgaaaccttccggcctgccggcggagacatgagagacaattggagaagcgagctgtacaagtacaaggtggtcaagatcgagcccctgggcgtcgcaccaacacggtgcaagagaagagtcgtgggacgtagacgaaggcggagagccgttggaatcggagccgtgttcctgggctttctgggagccgctggatctacaatgggcgctgccagcatgaccctgacagtgcaggctagaaatctgctgagcggcatcgtgcagcagcagagcaatctgctcagagcccctgaggctcagcagcacctcctgaaactgacagtgtggggaatcaagcagctgcaggccagagtgctgaccgtggaaagatacgccagagatcagcagctcctcggaatctggggctgtagcggcaagctgatctgctgcaccaacgtgccctggaactccagctggtccaaccggaatctgagcgagatctgggataacatgacctggctgcagtgggacaaagagatctccaactacacccagatcatctacggcctgctggaagagagccagaaccagcaagagaaaaacgagcaggacctgctggccctggatggcggaggatctggcgacattatcaagctgctgaacgagcaagtgaacaaagaaatgaacagcagcaacctgtacatgagcatgagcagctggtgttacacccacagccttgatggcgccggactgttcctgtttgatcacgccgccgaggaatacgagcacgccaagaagctgatcatcttcctgaacgagaacaatgtgcccgtgcagctgaccagcatctctgcccctgagcacaagttcgagggcctgacacagatctttcagaaggcctacgaacacgagcagcacatctccgagtccatcaacaatatcgtggaccacgccattaagagcaaggatcacgccaccttcaactttctccagtggtacgtggccgaacagcacgaggaagaagtgctgttcaaggacatcctggacaagattgagctgatcggcaacgagaaccacggcctgtatctggccgaccagtacgtgaagggaatcgccaagagccggaagtcctgatgaggatcc

SEQ ID NO: 275 - protein, 733 aa, synthetic construct
MPMGSLQPLATLYLLGMLVASVLAEGNLWVTVYYGVPVWKEAKTTLFCASDAKAYKKEVANVWATHACVPTDPSPQELFLENVTENFNMWKNDMVDQMHEDIISLWDQSLKPCVKLTPLCVTLICSTATVNNRAVDEMKNCSFNTTTEIRDKKKKEYALFYRSDVVPLDETNNTSEYRLINCNTSAVTQACPKVTFEPIPIHYCAPAGYAILKCNDETFNGTGPCSNVSTVQCTHGIRPVVSTQLLLNGSLAEKEIVIRSENLTNNAKIIIVHLHTPVEIVCTRPNNNTRKSVRIGPGQTFYATGDIIGDIKQAHCNISEEKWNETLQKVGIELQKHFPNKTIKYNQSAGGDMEITTHSFNCGGEFFYCNTSKLFNSTYNGTYISTNSTNSTSYITLQCRIKQIINMWQGVGRAMYAPPIAGNITCRSNITGLLLTRDGGINNVSNETETFRPAGGDMRDNWRSELYKYKVVEVQPLGIAPTGAKRRVVEREKRAAGLGALFLGFLGAAGSTMGAASITLTVQARQLLSGIVQQQSNLLRAIEAQQHMLQLTVWGIKQLQARVLTLERYAKDQQLLGMWGCSGKLICTTNVPWNTSWSNKSEMDIWNNMTWMQWEREISNYTETIYMLLEDSQRQQERNEKDLLALDSWNSLWNWFNITNWLWYIKIFIMIVGGLIGLRIVFAVLSIVNRVRQGISPLSLQTLTPNPREPDRLRGIEEEGGEQDRDRSIRLVS

SEQ ID NO: 276 - protein, 695 aa, synthetic construct
MPMGSLQPLATLYLLGMLVASVLAEGNLWVTVYYGVPVWKEAKTTLFCASDAKAYKKEVANVWATHACVPTDPSPQELFLENVTENFNMWKNDMVDQMHEDIISLWDQSLKPCVKLTPLCVTLICSTATVNNRAVDEMKNCSFNTTTEIRDKKKKEYALFYRSDVVPLDETNNTSEYRLINCNTSAVTQACPKVTFEPIPIHYCAPAGYAILKCNDETFNGTGPCSNVSTVQCTHGIRPVVSTQLLLNGSLAEKEIVIRSENLTNNAKIIIVHLHTPVEIVCTRPNNNTRKSVRIGPGQTFYATGDIIGDIKQAHCNISEEKWNETLQKVGIELQKHFPNKTIKYNQSAGGDMEITTHSFNCGGEFFYCNTSKLFNSTYNGTYISTNSTNSTSYITLQCRIKQIINMWQGVGRAMYAPPIAGNITCRSNITGLLLTRDGGINNVSNETETFRPAGGDMRDNWRSELYKYKVVEVQPLGIAPTGAKRRVVEREKRAAGLGALFLGFLGAAGSTMGAASITLTVQARQLLSGIVQQQSNLLRAIEAQQHMLQLTVWGIKQLQARVLTLERYAKDQQLLGMWGCSGKLICTTNVPWNTSWSNKSEMDIWNNMTWMQWEREISNYTETIYMLLEDSQRQQERNEKDLLALDSWNSLWNWFNITNWLWYIKIFIMIVGGLIGLRIVFAVLSIVNRVRQGY

SEQ ID NO: 277 - protein, 817 aa, synthetic construct
MGSLQPLATLYLLGMLVASVLAAENLWVTVYYGVPVWKEAKTTLFCASDAKAYKKEVHNVWATHACVPTDPSPQELFLENVTENFNMWKNDMVDQMHEDIISLWCQSLKPCVKLTPLCVTLICSTATVNNRAVDEMKNCSFNTTTEIRDKKKKEYALFYRSDVVPLDETNNTSEYRLINCNTSAVTQACPKVTFEPIPIHYCAPAGYAILKCNNETFNGTGPCSNVSTVQCTHGIRPVVSTQLLLNGSLAEKEIVIRSENLTNNAKIIIVHLNTSVEIVCTRPNNNTRKSVRIGPGQTFYATGDIIGDIKQAHCNISEEKWNETLQKVGIELQKHFPNKTIKYNQSAGGDMEITTHSFNCGGEFFYCNTSKLFNSTYNGTYISTNSTNSTSYITLQCRIKQIINMWQGCGVGRAMYAPPIAGNITCRSNITGLLLTRDGGINNVSNETETFRPAGGDMRDNWRSELYKYKVVKIEPLGVAPTRCKRRVVGRRRRRRAVGIGAVFLGFLGAAGSTMGAASMTLTVQARNLLSGIVQQQSNLLRAPEAQQHLLKLTVWGIKQLQARVLAVERYLRDQQLLGIWGCSGKLICCTNVPWNSSWSNRNLSEIWDNMTWLQWDKEISNYTQIIYGLLEESQNQQEKNEQDLLALDGGGSGDIIKLLNEQVNKEMNSSNLYMSMSSWCYTHSLDGAGLFLFDHAAEEYEHAKKLIIFLNENNVPVQLTSISAPEHKFEGLTQIFQKAYEHEQHISESINNIVDHAIKSKDHATFNFLQWYVAEQHEEEVLFKDILDKIELIGNENHGLYLADQYVKGIAKSRKS

SEQ ID NO: 278 - protein, 815 aa, synthetic construct
MGSLQPLATLYLLGMLVASVLAAENLWVTVYYGVPVWKEACTTLFCASDAKAYKKKVRNVWATHCCVPTDPSPQELFLENVTENFNMWKNDMVDQMHEDIISLWDQSLKPCVKLTPLCVTLICSTATVNNRAVDEMKNCSFNTTTEIRDKKKKEYALFYRSDVVPLDETNNTSEYRLINCNTSACTQACPKVTFEPIPIHYCAPAGYAILKCNNETFNGTGPCSNVSTVQCTHGIRPVVSTQLLLNGSLAEKEIVIRSENLTNNAKIIIVHLNTSVEIVCTRPNNNTRKSVRIGPGQWFYATGDIIGDIKQAHCNISEEKWNETLQKVGIELQKHFPNKTIKYNQSAGGDMEITTHSFNCGGEFFYCNTSKLFNSTYNGTYISTNSTNSTSYITLQCRIKQIINMWQGVGRCMYAPPIAGNITCRSNITGLLLTRDGGINNVSNETETFRPAGGDMRDNWRSELYKYKVVKIEPLGVAPTRCKRRVVGRRRRRRAVGIGAVFLGFLGAAGSTMGAASMTLTVQARNLLSGIVQQQSNCLRAPECQQHLLKLTVWGIKQLQARVLAVERYLRDQQLLGIWGCSGKLICCTNVPWNSSWSNRNLSEIWDNMTWLQWDKEISNYTQIIYGLLEESQNQQEKNEQDLLALDGGGSGDIIKLLNEQVNKEMNSSNLYMSMSSWCYTHSLDGAGLFLFDHAAEEYEHAKKLIIFLNENNVPVQLTSISAPEHKFEGLTQIFQKAYEHEQHISESINNIVDHAIKSKDHATFNFLQWYVAEQHEEEVLFKDILDKIELIGNENHGLYLADQYVKGIAKSRKS

SEQ ID NO: 279 - protein, 815 aa, synthetic construct
MGSLQPLATLYLLGMLVASVLAAENLWVTVYYGVPVWKEAKTTLFCASDAKAYKKEVHNIWATHACVPTDPSPQELFLENVTENFNMWKNDMVDQMHEDIISLWDQSLKPCVKLTPLCVTLICSTATVNNRAVDEMKNCSFNTTTEIRDKKKKEYALFYRSDVVPLDETNNTSEYRLINCNTSAVTMVCPKLTFEPIPIHYCAPAGYAILKCNNETFNGTGPCSNVSTVQCTHGIRPVLSTQLLLNGSLAEKEIVIRSENLTNNAKIIIVHLNTSVEIVCTRPLNLTRKSVRIGPGQTFYAMGDIIGDIKQAHCNISEEKWNETLQKVGIELQKHFPNKTIKYNQSAGGDMEITTHSFNCGGEFFYCNTSKLFNSTYNGTYISTNSTNSTSYITLQCRIKMIINMWQGVGRAMYAPPIAGNITCRSNITGLLLTRDGGINNVSNETETFRPAGGDMRDNWRSELYKYKVVKIEPLGVAPTRCKRRVVGRRRRRRAVGIGAVFLGFLGAAGSTMGAASMTLTVQARNLLSGIVQQQSNLLRAPEAQQHLLKLTVWGIKQLQARVLAVERYLRDQQLLGIWGCSGKLICCTNVPWNSSWSNRNLSEIWDNMTWLQWDKEISNYTQIIYGLLEESQNQQEKNEQDLLALDGGGSGDIIKLLNEQVNKEMNSSNLYMSMSSWCYTHSLDGAGLFLFDHAAEEYEHAKKLIIFLNENNVPVQLTSISAPEHKFEGLTQIFQKAYEHEQHISESINNIVDHAIKSKDHATFNFLQWYVAEQHEEEVLFKDILDKIELIGNENHGLYLADQYVKGIAKSRKS

SEQ ID NO: 280 - protein, 815 aa, synthetic construct
MGSLQPLATLYLLGMLVASVLAAENLWVTVYYGVPVWKEACTTLFCASDAKAYKKKVRNVWATHCCVPTDPSPQELFLENVTENFNMWKNDMVDQMHEDIISLWDQSLKPCVKLTPLCVTLICSTATVNNRAVDEMKNCSFNTTTEIRDKKKKEYALFYRSDVVPLDETNNTSEYRLINCNTSAVTQACPKVTFEPIPIHYCAPAGYAILKCNNETFNGTGPCSNVSTVQCTHGIRPVVSTQLLLNGSLAEKEIVIRSENLTNNAKIIIVHLNTSVEIVCTRPNNNTRKSVRIGPGQWFYATGDIIGDIKQAHCNISEEKWNETLQKVGIELQKHFPNKTIKYNQSAGGDMEITTHSFNCGGEFFYCNTSKLFNSTYNGTYISTNSTNSTSYITLQCRIKQIINMWQGVGRAMYAPPIAGNITCRSNITGLLLTRDGGINNVSNETETFRPAGGDMRDNWRSELYKYKVVKIEPLGVAPTRCKRRVVGRRRRRRAVGIGAVFLGFLGAAGSTMGAASMTLTVQARNLLSGIVQQQSNCLRAPECQQHLLKLTVWGIKQLQARVLAVERYLRDQQLLGIWGCSGKLICCTNVPWNSSWSNRNLSEIWDNMTWLQWDKEISNYTQIIYGLLEESQNQQEKNEQDLLALDGGGSGDIIKLLNEQVNKEMNSSNLYMSMSSWCYTHSLDGAGLFLFDHAAEEYEHAKKLIIFLNENNVPVQLTSISAPEHKFEGLTQIFQKAYEHEQHISESINNIVDHAIKSKDHATFNFLQWYVAEQHEEEVLFKDILDKIELIGNENHGLYLADQYVKGIAKSRKS

SEQ ID NO: 281 - protein, 815 aa, synthetic construct
MGSLQPLATLYLLGMLVASVLAAENLWVTVYYGVPVWKEAKTTLFCASDAKAYKKEVHNVWATHACVPTDPSPQELFLENVTENFNMWKNDMVDQMHEDIISLWDQSLKPCVKLTPLCVTLICSTATVNNRAVDEMKNCSFNTTTEIRDKKKKEYALFYRSDVVPLDETNNTSEYRLINCNTSACTQACPKVTFEPIPIHYCAPAGYAILKCNNETFNGTGPCSNVSTVQCTHGIRPVVSTQLLLNGSLAEKEIVIRSENLTNNAKIIIVHLNTSVEIVCTRPNNNTRKSVRIGPGQTFYATGDIIGDIKQAHCNISEEKWNETLQKVGIELQKHFPNKTIKYNQSAGGDMEITTHSFNCGGEFFYCNTSKLFNSTYNGTYISTNSTNSTSYITLQCRIKQIINMWQGVGRCMYAPPIAGNITCRSNITGLLLTRDGGINNVSNETETFRPAGGDMRDNWRSELYKYKVVKIEPLGVAPTRCKRRVVGRRRRRRAVGIGAVFLGFLGAAGSTMGAASMTLTVQARNLLSGIVQQQSNLLRAPEAQQHLLKLTVWGIKQLQARVLAVERYLRDQQLLGIWGCSGKLICCTNVPWNSSWSNRNLSEIWDNMTWLQWDKEISNYTQIIYGLLEESQNQQEKNEQDLLALDGGGSGDIIKLLNEQVNKEMNSSNLYMSMSSWCYTHSLDGAGLFLFDHAAEEYEHAKKLIIFLNENNVPVQLTSISAPEHKFEGLTQIFQKAYEHEQHISESINNIVDHAIKSKDHATFNFLQWYVAEQHEEEVLFKDILDKIELIGNENHGLYLADQYVKGIAKSRKS

SEQ ID NO: 282 - protein, 817 aa, synthetic construct
MPMGSLQPLATLYLLGMLVASVLAAENLWVTVYYGVPVWKEAKTTLFCASDAKAYKKEVHNIWATHACVPTDPSPQELFLENVTENFNMWKNDMVDQMHEDIISLWDQSLKPCVKLTPLCVTLICSTATVNNRAVDEMKNCSFNTTTEIRDKKKKEYALFYRSDVVPLDETNNTSEYRLINCNTSAVTQVCPKLTFEPIPIHYCAPAGYAILKCNNETFNGTGPCSNVSTVQCTHGIRPVLSTQLLLNGSLAEKEIVIRSENLTNNAKIIIVHLNTSVEIVCTRPNNNTRKSVRIGPGQTFYATGDIIGDIKQAHCNISEEKWNETLQKVGIELQKHFPNKTIKYNQSAGGDMEITTHSFNCGGEFFYCNTSKLFNSTYNGTYISTNSTNSTSYITLQCRIKQIINMWQGVGRAMYAPPIAGNITCRSNITGLLLTRDGGINNVSNETETFRPAGGDMRDNWRSELYKYKVVKIEPLGVAPTRCKRRVVGRRRRRRAVGIGAVFLGFLGAAGSTMGAASMTLTVQARNLLSGIVQQQSNLLRAPEAQQHLLKLTVWGIKQLQARVLAVERYLRDQQLLGIWGCSGKLICCTNVPWNSSWSNRNLSEIWDNMTWLQWDKEISNYTQIIYGLLEESQNQQEKNEQDLLALDGGGSGDIIKLLNEQVNKEMNSSNLYMSMSSWCYTHSLDGAGLFLFDHAAEEYEHAKKLIIFLNENNVPVQLTSISAPEHKFEGLTQIFQKAYEHEQHISESINNIVDHAIKSKDHATFNFLQWYVAEQHEEEVLFKDILDKIELIGNENHGLYLADQYVKGIAKSRKS

SEQ ID NO: 283 - protein, 808 aa, synthetic construct
MPMGSLQPLATLYLLGMLVASVLAEGNLWVTVYYGVPVWKEAKTTLFCASDAKAYKKEVHNVWATHACVPTDPSPQELFLENVTENFNMWKNDMVDQMHEDIISLWDQSLKPCVKLTPLCVTLICSTATVNNRAVDEMKNCSFNTTTEIRDKKKKEYALFYRSDVVPLDETNNTSEYRLINCNTSACTQACPKVTFEPIPIHYCAPAGYAILKCNNETFNGTGPCSNVSTVQCTHGIRPVVSTQLLLNGSLAEKEIVIRSENLTNNAKIIIVHLNTSVEIVCTRPNNNTRKSVRIGPGQTFYATGDIIGDIKQAHCNISEEKWNETLQKVGIELQKHFPNKTIKYNQSAGGDMEITTHSFNCGGEFFYCNTSKLFNSTYNGTYISTNSTNSTSYITLQCRIKQIINMWQGVGRCMYAPPIAGNITCRSNITGLLLTRDGGINNVSNETETFRPAGGDMRDNWRSELYKYKVVEVQPLGIAPTGCKRRVVEGGGGSGGGGSAVGIGAVFLGFLGAAGSTMGAASMTLTVQARNLLSGNPDWLPDMTVWGIKQLQARVLAVERYLRDQQLLGIWGCSGKLICCTNVPWNSSWSNRNLSEIWDNMTWLQWDKEISNYTQIIYGLLEESQNQQEKNEQDLLALDGGGSGDIIKLLNEQVNKEMNSSNLYMSMSSWCYTHSLDGAGLFLFDHAAEEYEHAKKLIIFLNENNVPVQLTSISAPEHKFEGLTQIFQKAYEHEQHISESINNIVDHAIKSKDHATFNFLQWYVAEQHEEEVLFKDILDKIELIGNENHGLYLADQYVKGIAKSRKS

SEQ ID NO: 284 - protein, 817 aa, synthetic construct
MPMGSLQPLATLYLLGMLVASVLAAENLWVTVYYGVPVWKEAKTTLFCASDAKAYKKEVANVWATHACVPTDPSPQELFLENVTENFNMWKNDMVDQMHEDIISLWDQSLKPCVKLTPLCVTLICSTATVNNRAVDEMKNCSFNTTTEIRDKKKKEYALFYRSDVVPLDETNNTSEYRLINCNTSAVTQACPKVTFEPIPIHYCAPAGYAILKCNNETFNGTGPCSNVSTVQCTHGIRPVVSTQLLLNGSLAEKEIVIRSENLTNNAKIIIVHLNTSVEIVCTRPNNNTRKSVRIGPGQTFYATGDIIGDIKQAHCNISEEKWNETLQKVGIELQKHFPNKTIKYNQSAGGDMEITTHSFNCGGEFFYCNTSKLFNSTYNGTYISTNSTNSTSYITLQCRIKQIINMWQGVGRAMYAPPIAGNITCRSNITGLLLTRDGGINNVSNETETFRPAGGDMRDNWRSELYKYKVVKIEPLGVAPTRCKRRVVGRRRRRRAVGIGAVFLGFLGAAGSTMGAASMTLTVQARNLLSGIVQQQSNLLRAPEAQQHLLKLTVWGIKQLQARVLTVERYARDQQLLGIWGCSGKLICCTNVPWNSSWSNRNLSEIWDNMTWLQWDKEISNYTQIIYGLLEESQNQQEKNEQDLLALDGGGSGDIIKLLNEQVNKEMNSSNLYMSMSSWCYTHSLDGAGLFLFDHAAEEYEHAKKLIIFLNENNVPVQLTSISAPEHKFEGLTQIFQKAYEHEQHISESINNIVDHAIKSKDHATFNFLQWYVAEQHEEEVLFKDILDKIELIGNENHGLYLADQYVKGIAKSRKS

SEQ ID NO: 285 - DNA, 1952 bp, synthetic construct
  source 1..1952: mol_type = other DNA
atgggctccctgcagcccctggccaccctgtacctgctgggcatgctggtggcctccgtgctggccgccgagaacctgtgggtgaccgtgtactacggcgtgcccgtgtggaaggaggccaagaccaccctgttctgcgcctccgacgcccgcgcctacgagaaggaggtgcacaacgtgtgggccacccacgcctgcgtgcccaccgacccctccccccaggagctggtgctgggcaacgtgaccgagaacttcaacatgtggaagaacgacatggtggaccagatgcacgaggacatcatctccctgtgggaccagtccctgaagccctgcgtgaagctgacccccctgtgcgtgaccctgatctgctccgacgccggctccggcggcgtggaggagatgaagaactgctccttcaacaccaccaccgagatccgcgacaaggagaagaaggagtacgccctgttctacaagcccgacatcgtgcccctgtccgagaccaacaacacctccgagtaccgcctgatcaactgcaacacctccgcctgcacccaggcctgccccaaggtgaccttcgagcccatccccatccactactgcgcccccgccggctacgccatcctgaagtgcaacgacgagaccttcaacggcaccggcccctgctccaacgtgtccaccgtgcagtgcacccacggcatccgccccgtggtgtccacccagctgctgctgaacggctccctggccgagaaggagatcgtgatccgctccgagaacctgaccaacaacgccaagatcatcatcgtgcacctgcacacccccgtggagatcgtgtgcacccgccccaacaacaacacccgcaagtccgtgcgcatcggccccggccagaccttctacgccaccggcgacatcatcggcgacatcaagcaggcccactgcaacatctccgaggagaagtggaacgacaccctgcagaaggtgggcatcgagctgcagaagcacttccccaacaagaccatcaagtacaaccagtccgccggcggcgacatggagatcaccacccactccttcaactgcggcggcgagttcttctactgcaacacctccaacctgttcaacggcacctacaacggcacctacatctccaccaactcctccgccaactccacctccaccatcaccctgcagtgccgcatcaagcagatcatcaacatgtggcagggcgtgggccgctgcatgtacgccccccccatcgccggcaacatcacctgccgctccaacatcaccggcctgctgctgacccgcgacggcggcaccaactccaacgagaccgagaccttccgccccgccggcggcgacatgcgcgacaactggcgctccgagctgtacaagtacaaggtggtgaagatcgagcccctgggcgtggcccccacccgctgcaagcgccgcgtggtgggccgccgccgccgccgccgcgccgtgggcatcggcgccgtgttcctgggcttcctgggcgccgccggctccaccatgggcgccgcctccatgaccctgaccgtgcaggcccgcaacctgctgtccggcatcgtgcagcagcagtccaacctgctgcgcgcccccgaggcccagcagcacctgctgaagctgaccgtgtggggcatcaagcagctgcaggcccgcgtgctggccgtggagcgctacctgcgcgaccagcagctgctgggcatctggggctgctccggcaagctgatctgctgcaccaacgtgccctggaactcctcctggtccaaccgcaacctgtccgagatctgggacaacatgacctggctgcagtgggacaaggagatctccaactacacccagatcatctacggcctgctggaggagtcccagaaccagcaggagaagaacgagcaggacctgctggccctggactgataagcggccgcggatcc

SEQ ID NO: 286 - DNA, 1944 bp, synthetic construct
  source 1..1944: mol_type = other DNA
atgcctatgggatctctgcagcctctggccacactgtacctgctgggaatgctggtggcttctgtgctggccgccgagaatctgtgggtcacagtgtactatggcgtgcccgtgtggaaagaggccaagaccacactgttctgcgcctccgatgccagagcctacgagaaagaggtgcacaacgtctgggccacacacgcctgtgtgcctaccgatccatctcctcaagagctggtgctgggcaacgtgaccgagaacttcaacatgtggaagaacgacatggtggaccagatgcacgaggacatcatcagcctgtgggaccagagcctgaagccttgcgtgaagctgacccctctgtgcgtgaccctgatctgttctgacgccggctccggcggcgtggaagagatgaagaactgcagcttcaacaccaccaccgagatccgggacaagaagaagaaagagtacgccctgttctacaagcccgacatcgtgcccctgagcgagacaaacaacaccagcgagtaccggctgatcaactgcaacacctccgcctgcactcaggcctgtcctaaagtgaccttcgagcccattcctatccactactgtgcccctgccggctacgccatcctgaagtgcaacaacgagacattcaacggcacaggcccctgcagcaatgtgtccaccgtgcagtgtacccacggcatcagaccagtggtgtctacccagctgctgctgaatggaagcctggccgagaaagaaatcgtgatcagaagcgagaacctgaccaacaacgccaagatcatcatcgtccacctgaataccagcgtggaaatcgtgtgcacccggcctaacaacaacacccggaagtctgtgcggatcggccctggccagacattctatgccaccggcgatatcatcggcgacatcaagcaggcccactgcaacatcagcgaggaaaagtggaacgacaccctgcagaaagtgggcatcgagctgcagaagcacttccccaacaagaccatcaagtacaaccagagcgctggcggcgacatggaaatcaccacacacagcttcaattgtggcggcgagttcttctactgcaataccagcaacctgttcaacgggacctacaatggcacctacatcagcaccaacagcagcgccaactccaccagcaccatcactctgcagtgccggatcaagcagatcatcaatatgtggcaaggcgtcggccggtgtatgtacgcccctcctatcgccggcaacatcacctgtcggagcaatatcacaggcctgctgctcaccagagatggcggcaccaatagcaacgaaaccgaaaccttcagacctgccggcggagacatgagagacaattggagaagcgagctgtacaagtacaaggtggtcaagatcgagcccctgggcgtcgcacctacacggtgcaagagaagagtcgtgggccgtcgtagaaggcggagagccgttggaattggcgccgtgttcctgggctttctgggagccgctggatctacaatgggcgctgccagcatgaccctgacagtgcaggctagaaatctgctgagcggcatcgtgcagcagcagagcaatctgctcagagcccctgaggctcagcagcacctcctgaaactgacagtgtggggaatcaagcagctgcaggccagagtgctggcagtggaaagatacctgagggaccagcagctcctcggaatctggggctgttctggcaagctgatctgctgcaccaacgtgccctggaacagctcctggtccaacagaaacctgtccgagatctgggataacatgacctggctgcagtgggacaaagagatcagcaactacacccagatcatctacggcctgctggaagagagccagaaccagcaagagaaaaacgagcaggacctgctggccctggattgatga

SEQ ID NO: 287 - DNA, 2448 bp, synthetic construct
  source 1..2448: mol_type = other DNA
atgcctatgggatctctgcagcctctggccacactgtacctgctgggaatgctggtggcttctgtgctggccgccgagaatctgtgggtcacagtgtactatggcgtgcccgtgtggaaagaggccaagaccacactgttctgcgcctccgatgccagagcctacgagaaagaggtgcacaacgtctgggccacacacgcctgtgtgcctaccgatccatctcctcaagagctggtgctgggcaacgtgaccgagaacttcaacatgtggaagaacgacatggtggaccagatgcacgaggacatcatcagcctgtgggaccagagcctgaagccttgcgtgaagctgacccctctgtgcgtgaccctgatctgttctgacgccggctccggcggcgtggaagagatgaagaactgcagcttcaacaccaccaccgagatccgggacaagaagaagaaagagtacgccctgttctacaagcccgacatcgtgcccctgagcgagacaaacaacaccagcgagtaccggctgatcaactgcaacacctccgcctgcactcaggcctgtcctaaagtgaccttcgagcccattcctatccactactgtgcccctgccggctacgccatcctgaagtgcaacaacgagacattcaacggcacaggcccctgcagcaatgtgtccaccgtgcagtgtacccacggcatcagaccagtggtgtctacccagctgctgctgaatggaagcctggccgagaaagaaatcgtgatcagaagcgagaacctgaccaacaacgccaagatcatcatcgtccacctgaataccagcgtggaaatcgtgtgcacccggcctaacaacaacacccggaagtctgtgcggatcggccctggccagacattctatgccaccggcgatatcatcggcgacatcaaacaggcccactgtaacatcagcgaggaaaagtggaacgacaccctgcagaaagtgggcatcgagctgcagaagcacttccccaacaagaccatcaagtacaaccagagcgctggcggcgacatggaaatcaccacacacagcttcaattgtggcggcgagttcttctactgcaataccagcaacctgttcaacgggacctacaatggcacctacatcagcaccaacagcagcgccaactccaccagcaccatcactctgcagtgccggatcaagcagatcatcaatatgtggcaaggcgtcggccggtgtatgtacgcccctcctatcgccggcaacatcacctgtcggagcaatatcacaggcctgctgctcaccagagatggcggcaccaatagcaacgaaaccgaaaccttcagacctgccggcggagacatgagagacaattggagaagcgagctgtacaagtacaaggtggtcaagatcgagcccctgggcgtcgcacctacacggtgcaagagaagagtcgtgggccgtcgtagaaggcggagagccgttggaattggcgccgtgttcctgggctttctgggagccgctggatctacaatgggcgctgccagcatgaccctgacagtgcaggctagaaatctgctgagcggcatcgtgcagcagcagagcaatctgctcagagcccctgaggctcagcagcacctcctgaaactgacagtgtggggcatcaagcagctgcaggcaagagtgctggcagtggaaagatacctgcgggaccagcagctcctcggaatctggggatgtagcggcaagctgatctgctgcaccaacgtgccctggaacagctcctggtccaacagaaacctgtccgagatctgggataacatgacctggctgcagtgggacaaagagatcagcaactacacccagatcatctacggcctgctggaagagagccagaaccagcaagagaaaaacgagcaggacctgctggccctggattctggcggagacattatcaagctgctgaacgagcaagtgaacaaagaaatgcagtcctccaacctgtacatgagcatgagcagctggtgttacacccacagccttgatggcgccggactgttcctgtttgatcacgccgccgaggaatacgagcacgccaagaagctgatcatcttcctgaacgagaacaatgtgcccgtgcagctgaccagcattagcgccccagagcacaagttcgagggcctgacacagatctttcagaaggcctacgaacacgagcagcacatctccgagagcatcaacaacatcgtggaccacgccattaagagcaaggatcacgccaccttcaattttctgcagtggtacgtggccgaacagcacgaggaagaagtgctgttcaaggacatcctggacaagattgagctgatcggcaacgagaaccacggcctgtatctggccgaccagtacgtgaagggaatcgccaagagccggaagtccggctcctgatga

SEQ ID NO: 288 - DNA, 2448 bp, synthetic construct
  source 1..2448: mol_type = other DNA
atgcctatgggatctctgcagcctctggccacactgtacctgctgggaatgctggtggcttctgtgctggccgccgagaatctgtgggtcacagtgtactatggcgtgcccgtgtggaaagaggccaagaccacactgttctgcgcctccgatgccagagcctacgagaaagaggtgcacaacgtctgggccacacacgcctgtgtgcctaccgatccatctcctcaagagctggtgctgggcaacgtgaccgagaacttcaacatgtggaagaacgacatggtggaccagatgcacgaggacatcatcagcctgtgggaccagagcctgaagccttgcgtgaagctgacccctctgtgcgtgaccctgatctgttctgacgccggcaacggctccgtggaagagatgaagaactgcagcttcaacaccaccaccgagatccgggacaagaagaagaaagagtacgccctgttctacaagcccgacatcgtgcccctgagcgagacaaacaacaccagcgagtaccggctgatcaactgcaacacctccgcctgcactcaggcctgtcctaaagtgaccttcgagcccattcctatccactactgtgcccctgccggctacgccatcctgaagtgcaacaacgagacattcaacggcacaggcccctgcagcaatgtgtccaccgtgcagtgtacccacggcatcagaccagtggtgtctacccagctgctgctgaatggaagcctggccgagaaagaaatcgtgatcagaagcgagaacctgaccaacaacgccaagatcatcatcgtccacctgaataccagcgtggaaatcgtgtgcacccggcctaacaacaacacccggaagtctgtgcggatcggccctggccagacattctatgccaccggcgatatcatcggcgacatcaaacaggcccactgtaacatcagcgaggaaaagtggaacgacaccctgcagaaagtgggcatcgagctgcagaagcacttccccaacaagaccatcaagtacaaccagagcgctggcggcgacatggaaatcaccacacacagcttcaattgtggcggcgagttcttctactgcaataccagcaacctgttcaacgggacctacaatggcacctacatcagcaccaacagcagcgccaactccaccagcaccatcactctgcagtgccggatcaagcagatcatcaatatgtggcaaggcgtcggccggtgtatgtacgcccctcctatcgccggcaacatcacctgtcggagcaatatcacaggcctgctgctcaccagagatggcggcaccaatagcaacgaaaccgaaaccttcagacctgccggcggagacatgagagacaattggagaagcgagctgtacaagtacaaggtggtcaagatcgagcccctgggcgtcgcacctacacggtgcaagagaagagtcgtgggccgtcgtagaaggcggagagccgttggaattggcgccgtgttcctgggctttctgggagccgctggatctacaatgggcgctgccagcatgaccctgacagtgcaggctagaaatctgctgagcggcatcgtgcagcagcagagcaatctgctcagagcccctgaggctcagcagcacctcctgaaactgacagtgtggggcatcaagcagctgcaggcaagagtgctggcagtggaaagatacctgcgggaccagcagctcctcggaatctggggatgtagcggcaagctgatctgctgcaccaacgtgccctggaacagctcctggtccaacagaaacctgtccgagatctgggataacatgacctggctgcagtgggacaaagagatcagcaactacacccagatcatctacggcctgctggaagagagccagaaccagcaagagaaaaacgagcaggacctgctggccctggattctggcggagacattatcaagctgctgaacgagcaagtgaacaaagaaatgcagtcctccaacctgtacatgagcatgagcagctggtgttacacccacagccttgatggcgccggactgttcctgtttgatcacgccgccgaggaatacgagcacgccaagaagctgatcatcttcctgaacgagaacaatgtgcccgtgcagctgaccagcattagcgccccagagcacaagttcgagggcctgacacagatctttcagaaggcctacgaacacgagcagcacatctccgagagcatcaacaacatcgtggaccacgccattaagagcaaggatcacgccaccttcaattttctgcagtggtacgtggccgaacagcacgaggaagaagtgctgttcaaggacatcctggacaagattgagctgatcggcaacgagaaccacggcctgtatctggccgaccagtacgtgaagggaatcgccaagagccggaagtccggctcctgatga

SEQ ID NO: 289 - DNA, 2448 bp, synthetic construct
  source 1..2448: mol_type = other DNA
atgcctatgggatctctgcagcctctggccacactgtacctgctgggaatgctggtggcttctgtgctggccgccgagaatctgtgggtcacagtgtactatggcgtgcccgtgtggaaagaggccaagaccacactgttctgcgcctccgatgccagagcctacgagaaagaggtgcacaacgtctgggccacacacgcctgtgtgcctaccgatccatctcctcaagagctggtgctgggcaacgtgaccgagaacttcaacatgtggaagaacgacatggtggaccagatgcacgaggacatcatcagcctgtgggaccagagcctgaagccttgcgtgaagctgacccctctgtgcgtgaccctgatctgttctgacgccggctccggcggcgtggaagagatgaagaactgcagcttcaacaccaccaccgagatccgggacaagaagaagaaagagtacgccctgttctacaagcccgacatcgtgcccctgagcgagacaaacaacaccagcgagtaccggctgatcaactgcaacacctccgcctgcactcaggcctgtcctaaagtgaccttcgagcccattcctatccactactgtgcccctgccggctacgccatcctgaagtgcaacaacgagacattcaacggcacaggcccctgcagcaatgtgtccaccgtgcagtgtacccacggcatcagaccagtggtgtctacccagctgctgctgaatggaagcctggccgagaaagaaatcgtgatcagaagcgagaacctgaccaacaacgccaagatcatcatcgtccacctgaataccagcgtggaaatcgtgtgcacccggcctaacaacaacacccggaagtctgtgcggatcggccctggccagacattctatgccaccggcgatatcatcggcgacatcaaacaggcccactgtaacatcagcgaggaaaagtggaacgacaccctgcagaaagtgggcatcgagctgcagaagcacttccccaacaagaccatcaagtacaaccagagcgctggcggcgacatggaaatcaccacacacagcttcaattgtggcggcgagttcttctactgcaataccagcaacctgttcaacgggacctacaatggcacctacatcagcaccaacagcagcgccgcctccaccagcaccatcactctgcagtgccggatcaagcagatcatcaatatgtggcaaggcgtcggccggtgtatgtacgcccctcctatcgccggcgccatcacctgtcggagcaatatcacaggcctgctgctcaccagagatggcggcaccaatagcaacgaaaccgaaaccttcagacctgccggcggagacatgagagacaattggagaagcgagctgtacaagtacaaggtggtcaagatcgagcccctgggcgtcgcacctacacggtgcaagagaagagtcgtgggccgtcgtagaaggcggagagccgttggaattggcgccgtgttcctgggctttctgggagccgctggatctacaatgggcgctgccagcatgaccctgacagtgcaggctagaaatctgctgagcggcatcgtgcagcagcagagcaatctgctcagagcccctgaggctcagcagcacctcctgaaactgacagtgtggggcatcaagcagctgcaggcaagagtgctggcagtggaaagatacctgcgggaccagcagctcctcggaatctggggatgtagcggcaagctgatctgctgcaccaacgtgccctggaacagctcctggtccaacagaaacctgtccgagatctgggataacatgacctggctgcagtgggacaaagagatcagcaactacacccagatcatctacggcctgctggaagagagccagaaccagcaagagaaaaacgagcaggacctgctggccctggattctggcggagacattatcaagctgctgaacgagcaagtgaacaaagaaatgcagtcctccaacctgtacatgagcatgagcagctggtgttacacccacagccttgatggcgccggactgttcctgtttgatcacgccgccgaggaatacgagcacgccaagaagctgatcatcttcctgaacgagaacaatgtgcccgtgcagctgaccagcattagcgccccagagcacaagttcgagggcctgacacagatctttcagaaggcctacgaacacgagcagcacatctccgagagcatcaacaacatcgtggaccacgccattaagagcaaggatcacgccaccttcaattttctgcagtggtacgtggccgaacagcacgaggaagaagtgctgttcaaggacatcctggacaagattgagctgatcggcaacgagaaccacggcctgtatctggccgaccagtacgtgaagggaatcgccaagagccggaagtccggctcctgatga

SEQ ID NO: 290 - DNA, 2448 bp, synthetic construct
  source 1..2448: mol_type = other DNA
atgcctatgggatctctgcagcctctggccacactgtacctgctgggaatgctggtggcttctgtgctggccgccgagaatctgtgggtcacagtgtactatggcgtgcccgtgtggaaagaggccaagaccacactgttctgcgcctccgatgccagagcctacgagaaagaggtgcacaacgtctgggccacacacgcctgtgtgcctaccgatccatctcctcaagagctggtgctgggcaacgtgaccgagaacttcaacatgtggaagaacgacatggtggaccagatgcacgaggacatcatcagcctgtgggaccagagcctgaagccttgcgtgaagctgacccctctgtgcgtgaccctgatctgttctgacgccggcaacggctccgtggaagagatgaagaactgcagcttcaacaccaccaccgagatccgggacaagaagaagaaagagtacgccctgttctacaagcccgacatcgtgcccctgagcgagacaaacaacaccagcgagtaccggctgatcaactgcaacacctccgcctgcactcaggcctgtcctaaagtgaccttcgagcccattcctatccactactgtgcccctgccggctacgccatcctgaagtgcaacaacgagacattcaacggcacaggcccctgcagcaatgtgtccaccgtgcagtgtacccacggcatcagaccagtggtgtctacccagctgctgctgaatggaagcctggccgagaaagaaatcgtgatcagaagcgagaacctgaccaacaacgccaagatcatcatcgtccacctgaataccagcgtggaaatcgtgtgcacccggcctaacaacaacacccggaagtctgtgcggatcggccctggccagacattctatgccaccggcgatatcatcggcgacatcaaacaggcccactgtaacatcagcgaggaaaagtggaacgacaccctgcagaaagtgggcatcgagctgcagaagcacttccccaacaagaccatcaagtacaaccagagcgctggcggcgacatggaaatcaccacacacagcttcaattgtggcggcgagttcttctactgcaataccagcaacctgttcaacgggacctacaatggcacctacatcagcaccaacagcagcgccgcctccaccagcaccatcactctgcagtgccggatcaagcagatcatcaatatgtggcaaggcgtcggccggtgtatgtacgcccctcctatcgccggcgccatcacctgtcggagcaatatcacaggcctgctgctcaccagagatggcggcaccaatagcaacgaaaccgaaaccttcagacctgccggcggagacatgagagacaattggagaagcgagctgtacaagtacaaggtggtcaagatcgagcccctgggcgtcgcacctacacggtgcaagagaagagtcgtgggccgtcgtagaaggcggagagccgttggaattggcgccgtgttcctgggctttctgggagccgctggatctacaatgggcgctgccagcatgaccctgacagtgcaggctagaaatctgctgagcggcatcgtgcagcagcagagcaatctgctcagagcccctgaggctcagcagcacctcctgaaactgacagtgtggggcatcaagcagctgcaggcaagagtgctggcagtggaaagatacctgcgggaccagcagctcctcggaatctggggatgtagcggcaagctgatctgctgcaccaacgtgccctggaacagctcctggtccaacagaaacctgtccgagatctgggataacatgacctggctgcagtgggacaaagagatcagcaactacacccagatcatctacggcctgctggaagagagccagaaccagcaagagaaaaacgagcaggacctgctggccctggattctggcggagacattatcaagctgctgaacgagcaagtgaacaaagaaatgcagtcctccaacctgtacatgagcatgagcagctggtgttacacccacagccttgatggcgccggactgttcctgtttgatcacgccgccgaggaatacgagcacgccaagaagctgatcatcttcctgaacgagaacaatgtgcccgtgcagctgaccagcattagcgccccagagcacaagttcgagggcctgacacagatctttcagaaggcctacgaacacgagcagcacatctccgagagcatcaacaacatcgtggaccacgccattaagagcaaggatcacgccaccttcaattttctgcagtggtacgtggccgaacagcacgaggaagaagtgctgttcaaggacatcctggacaagattgagctgatcggcaacgagaaccacggcctgtatctggccgaccagtacgtgaagggaatcgccaagagccggaagtccggctcctgatga

SEQ ID NO: 291 - DNA, 2022 bp, synthetic construct
  source 1..2022: mol_type = other DNA
atgcctatgggatctctgcagcctctggccacactgtacctgctgggaatgctggtggcttctgtgctggccgccgagaatctgtgggtcacagtgtactatggcgtgcccgtgtggaaagaggccaagaccacactgttctgcgcctccgatgccagagcctacgagaaagaggtgcacaacgtctgggccacacacgcctgtgtgcctaccgatccatctcctcaagagctggtgctgggcaacgtgaccgagaacttcaacatgtggaagaacgacatggtggaccagatgcacgaggacatcatcagcctgtgggaccagagcctgaagccttgcgtgaagctgacccctctgtgcgtgaccctgatctgttctgacgccggctccggcggcgtggaagagatgaagaactgcagcttcaacaccaccaccgagatccgggacaagaagaagaaagagtacgccctgttctacaagcccgacatcgtgcccctgagcgagacaaacaacaccagcgagtaccggctgatcaactgcaacacctccgcctgcactcaggcctgtcctaaagtgaccttcgagcccattcctatccactactgtgcccctgccggctacgccatcctgaagtgcaacaacgagacattcaacggcacaggcccctgcagcaatgtgtccaccgtgcagtgtacccacggcatcagaccagtggtgtctacccagctgctgctgaatggaagcctggccgagaaagaaatcgtgatcagaagcgagaacctgaccaacaacgccaagatcatcatcgtccacctgaataccagcgtggaaatcgtgtgcacccggcctaacaacaacacccggaagtctgtgcggatcggccctggccagacattctatgccaccggcgatatcatcggcgacatcaagcaggcccactgcaacatcagcgaggaaaagtggaacgacaccctgcagaaagtgggcatcgagctgcagaagcacttccccaacaagaccatcaagtacaaccagagcgctggcggcgacatggaaatcaccacacacagcttcaattgtggcggcgagttcttctactgcaataccagcaacctgttcaacgggacctacaatggcacctacatcagcaccaacagcagcgccaactccaccagcaccatcactctgcagtgccggatcaagcagatcatcaatatgtggcaaggcgtcggccggtgtatgtacgcccctcctatcgccggcaacatcacctgtcggagcaatatcacaggcctgctgctcaccagagatggcggcaccaatagcaacgaaaccgaaaccttcagacctgccggcggagacatgagagacaattggagaagcgagctgtacaagtacaaggtggtcaagatcgagcccctgggcgtcgcacctacacggtgcaagagaagagtcgtgggccgtcgtagaaggcggagagccgttggaattggcgccgtgttcctgggctttctgggagccgctggatctacaatgggcgctgccagcatgaccctgacagtgcaggctagaaatctgctgagcggcatcgtgcagcagcagagcaatctgctcagagcccctgaggctcagcagcacctcctgaaactgacagtgtggggaatcaagcagctgcaggccagagtgctggcagtggaaagatacctgagggaccagcagctcctcggaatctggggctgttctggcaagctgatctgctgcaccaacgtgccctggaacagctcctggtccaacagaaacctgtccgagatctgggataacatgacctggctgcagtgggacaaagagatcagcaactacacccagatcatctacggcctgctggaagagagccagaaccagcaagagaaaaacgagcaggacctgctggccctggatggcggaggcctggtgcctcagcagagcggcggcctgaacgacatcttcgaggcccagaagatcgagtggcacgaaggctgatga

SEQ ID NO: 292 - DNA, 1944 bp, synthetic construct
  source 1..1944: mol_type = other DNA
atgcctatgggatctctgcagcctctggccacactgtacctgctgggaatgctggtggcttctgtgctggccgccgagaatctgtgggtcacagtgtactatggcgtgcccgtgtggaaagaggccaagaccacactgttctgcgcctccgatgccagagcctacgagaaagaggtgcacaacgtctgggccacacacgcctgtgtgcctaccgatccatctcctcaagagctggtgctgggcaacgtgaccgagaacttcaacatgtggaagaacgacatggtggaccagatgcacgaggacatcatcagcctgtgggaccagagcctgaagccttgcgtgaagctgacccctctgtgcgtgaccctgatctgttctgacgccggcaacggctccgtggaagagatgaagaactgcagcttcaacaccaccaccgagatccgggacaagaagaagaaagagtacgccctgttctacaagcccgacatcgtgcccctgagcgagacaaacaacaccagcgagtaccggctgatcaactgcaacacctccgcctgcactcaggcctgtcctaaagtgaccttcgagcccattcctatccactactgtgcccctgccggctacgccatcctgaagtgcaacaacgagacattcaacggcacaggcccctgcagcaatgtgtccaccgtgcagtgtacccacggcatcagaccagtggtgtctacccagctgctgctgaatggaagcctggccgagaaagaaatcgtgatcagaagcgagaacctgaccaacaacgccaagatcatcatcgtccacctgaataccagcgtggaaatcgtgtgcacccggcctaacaacaacacccggaagtctgtgcggatcggccctggccagacattctatgccaccggcgatatcatcggcgacatcaagcaggcccactgcaacatcagcgaggaaaagtggaacgacaccctgcagaaagtgggcatcgagctgcagaagcacttccccaacaagaccatcaagtacaaccagagcgctggcggcgacatggaaatcaccacacacagcttcaattgtggcggcgagttcttctactgcaataccagcaacctgttcaacgggacctacaatggcacctacatcagcaccaacagcagcgccaactccaccagcaccatcactctgcagtgccggatcaagcagatcatcaatatgtggcaaggcgtcggccggtgtatgtacgcccctcctatcgccggcaacatcacctgtcggagcaatatcacaggcctgctgctcaccagagatggcggcaccaatagcaacgaaaccgaaaccttcagacctgccggcggagacatgagagacaattggagaagcgagctgtacaagtacaaggtggtcaagatcgagcccctgggcgtcgcacctacacggtgcaagagaagagtcgtgggccgtcgtagaaggcggagagccgttggaattggcgccgtgttcctgggctttctgggagccgctggatctacaatgggcgctgccagcatgaccctgacagtgcaggctagaaatctgctgagcggcatcgtgcagcagcagagcaatctgctcagagcccctgaggctcagcagcacctcctgaaactgacagtgtggggaatcaagcagctgcaggccagagtgctggcagtggaaagatacctgagggaccagcagctcctcggaatctggggctgttctggcaagctgatctgctgcaccaacgtgccctggaacagctcctggtccaacagaaacctgtccgagatctgggataacatgacctggctgcagtgggacaaagagatcagcaactacacccagatcatctacggcctgctggaagagagccagaaccagcaagagaaaaacgagcaggacctgctggccctggattgatga

SEQ ID NO: 293 - DNA, 2022 bp, synthetic construct
  source 1..2022: mol_type = other DNA
atgcctatgggatctctgcagcctctggccacactgtacctgctgggaatgctggtggcttctgtgctggccgccgagaatctgtgggtcacagtgtactatggcgtgcccgtgtggaaagaggccaagaccacactgttctgcgcctccgatgccagagcctacgagaaagaggtgcacaacgtctgggccacacacgcctgtgtgcctaccgatccatctcctcaagagctggtgctgggcaacgtgaccgagaacttcaacatgtggaagaacgacatggtggaccagatgcacgaggacatcatcagcctgtgggaccagagcctgaagccttgcgtgaagctgacccctctgtgcgtgaccctgatctgttctgacgccggcaacggctccgtggaagagatgaagaactgcagcttcaacaccaccaccgagatccgggacaagaagaagaaagagtacgccctgttctacaagcccgacatcgtgcccctgagcgagacaaacaacaccagcgagtaccggctgatcaactgcaacacctccgcctgcactcaggcctgtcctaaagtgaccttcgagcccattcctatccactactgtgcccctgccggctacgccatcctgaagtgcaacaacgagacattcaacggcacaggcccctgcagcaatgtgtccaccgtgcagtgtacccacggcatcagaccagtggtgtctacccagctgctgctgaatggaagcctggccgagaaagaaatcgtgatcagaagcgagaacctgaccaacaacgccaagatcatcatcgtccacctgaataccagcgtggaaatcgtgtgcacccggcctaacaacaacacccggaagtctgtgcggatcggccctggccagacattctatgccaccggcgatatcatcggcgacatcaagcaggcccactgcaacatcagcgaggaaaagtggaacgacaccctgcagaaagtgggcatcgagctgcagaagcacttccccaacaagaccatcaagtacaaccagagcgctggcggcgacatggaaatcaccacacacagcttcaattgtggcggcgagttcttctactgcaataccagcaacctgttcaacgggacctacaatggcacctacatcagcaccaacagcagcgccaactccaccagcaccatcactctgcagtgccggatcaagcagatcatcaatatgtggcaaggcgtcggccggtgtatgtacgcccctcctatcgccggcaacatcacctgtcggagcaatatcacaggcctgctgctcaccagagatggcggcaccaatagcaacgaaaccgaaaccttcagacctgccggcggagacatgagagacaattggagaagcgagctgtacaagtacaaggtggtcaagatcgagcccctgggcgtcgcacctacacggtgcaagagaagagtcgtgggccgtcgtagaaggcggagagccgttggaattggcgccgtgttcctgggctttctgggagccgctggatctacaatgggcgctgccagcatgaccctgacagtgcaggctagaaatctgctgagcggcatcgtgcagcagcagagcaatctgctcagagcccctgaggctcagcagcacctcctgaaactgacagtgtggggaatcaagcagctgcaggccagagtgctggcagtggaaagatacctgagggaccagcagctcctcggaatctggggctgttctggcaagctgatctgctgcaccaacgtgccctggaacagctcctggtccaacagaaacctgtccgagatctgggataacatgacctggctgcagtgggacaaagagatcagcaactacacccagatcatctacggcctgctggaagagagccagaaccagcaagagaaaaacgagcaggacctgctggccctggatggcggaggcctggtgcctcagcagagcggcggcctgaacgacatcttcgaggcccagaagatcgagtggcacgaaggctgatga

SEQ ID NO: 294 - DNA, 2082 bp, synthetic construct
  source 1..2082: mol_type = other DNA
atgggctccctgcagcccctggccaccctgtacctgctgggcatgctggtggcctccgtgctggccgccgagaacctgtgggtgaccgtgtactacggcgtgcccgtgtggaaggaggccaagaccaccctgttctgcgcctccgacgcccgcgcctacgagaaggaggtgcacaacgtgtgggccacccacgcctgcgtgcccaccgacccctccccccaggagctggtgctgggcaacgtgaccgagaacttcaacatgtggaagaacgacatggtggaccagatgcacgaggacatcatctccctgtgggaccagtccctgaagccctgcgtgaagctgacccccctgtgcgtgaccctgatctgctccgacgccggctccggcggcgtggaggagatgaagaactgctccttcaacaccaccaccgagatccgcgacaaggagaagaaggagtacgccctgttctacaagcccgacatcgtgcccctgtccgagaccaacaacacctccgagtaccgcctgatcaactgcaacacctccgcctgcacccaggcctgccccaaggtgaccttcgagcccatccccatccactactgcgcccccgccggctacgccatcctgaagtgcaacgacgagaccttcaacggcaccggcccctgctccaacgtgtccaccgtgcagtgcacccacggcatccgccccgtggtgtccacccagctgctgctgaacggctccctggccgagaaggagatcgtgatccgctccgagaacctgaccaacaacgccaagatcatcatcgtgcacctgcacacccccgtggagatcgtgtgcacccgccccaacaacaacacccgcaagtccgtgcgcatcggccccggccagaccttctacgccaccggcgacatcatcggcgacatcaagcaggcccactgcaacatctccgaggagaagtggaacgacaccctgcagaaggtgggcatcgagctgcagaagcacttccccaacaagaccatcaagtacaaccagtccgccggcggcgacatggagatcaccacccactccttcaactgcggcggcgagttcttctactgcaacacctccaacctgttcaacggcacctacaacggcacctacatctccaccaactcctccgccaactccacctccaccatcaccctgcagtgccgcatcaagcagatcatcaacatgtggcagggcgtgggccgctgcatgtacgccccccccatcgccggcaacatcacctgccgctccaacatcaccggcctgctgctgacccgcgacggcggcaccaactccaacgagaccgagaccttccgccccgccggcggcgacatgcgcgacaactggcgctccgagctgtacaagtacaaggtggtgaagatcgagcccctgggcgtggcccccacccgctgcaagcgccgcgtggtgggccgccgccgccgccgccgcgccgtgggcatcggcgccgtgttcctgggcttcctgggcgccgccggctccaccatgggcgccgcctccatgaccctgaccgtgcaggcccgcaacctgctgtccggcatcgtgcagcagcagtccaacctgctgcgcgcccccgaggcccagcagcacctgctgaagctgaccgtgtggggcatcaagcagctgcaggcccgcgtgctggccgtggagcgctacctgcgcgaccagcagctgctgggcatctggggctgctccggcaagctgatctgctgcaccaacgtgccctggaactcctcctggtccaaccgcaacctgtccgagatctgggacaacatgacctggctgcagtgggacaaggagatctccaactacacccagatcatctacggcctgctggaggagtcccagaaccagcaggagaagaacgagcaggacctgctggccctggacctggaggtgctgttccagggcccaggccatcaccaccatcaccaccatcatagcgcctggtcccacccccagttcgagaagggcggcggtagtggagggggcggatctggcggctcagcttggagccacccccagttcgaaaagtgataa

SEQ ID NO: 295 - DNA, 2016 bp, synthetic construct
  source 1..2016: mol_type = other DNA
atgggctccctgcagcccctggccaccctgtacctgctgggcatgctggtggcctccgtgctggccgccgagaacctgtgggtgaccgtgtactacggcgtgcccgtgtggaaggaggccaagaccaccctgttctgcgcctccgacgcccgcgcctacgagaaggaggtgcacaacgtgtgggccacccacgcctgcgtgcccaccgacccctccccccaggagctggtgctgggcaacgtgaccgagaacttcaacatgtggaagaacgacatggtggaccagatgcacgaggacatcatctccctgtgggaccagtccctgaagccctgcgtgaagctgacccccctgtgcgtgaccctgatctgctccgacgccggctccggcggcgtggaggagatgaagaactgctccttcaacaccaccaccgagatccgcgacaaggagaagaaggagtacgccctgttctacaagcccgacatcgtgcccctgtccgagaccaacaacacctccgagtaccgcctgatcaactgcaacacctccgcctgcacccaggcctgccccaaggtgaccttcgagcccatccccatccactactgcgcccccgccggctacgccatcctgaagtgcaacgacgagaccttcaacggcaccggcccctgctccaacgtgtccaccgtgcagtgcacccacggcatccgccccgtggtgtccacccagctgctgctgaacggctccctggccgagaaggagatcgtgatccgctccgagaacctgaccaacaacgccaagatcatcatcgtgcacctgcacacccccgtggagatcgtgtgcacccgccccaacaacaacacccgcaagtccgtgcgcatcggccccggccagaccttctacgccaccggcgacatcatcggcgacatcaagcaggcccactgcaacatctccgaggagaagtggaacgacaccctgcagaaggtgggcatcgagctgcagaagcacttccccaacaagaccatcaagtacaaccagtccgccggcggcgacatggagatcaccacccactccttcaactgcggcggcgagttcttctactgcaacacctccaacctgttcaacggcacctacaacggcacctacatctccaccaactcctccgccaactccacctccaccatcaccctgcagtgccgcatcaagcagatcatcaacatgtggcagggcgtgggccgctgcatgtacgccccccccatcgccggcaacatcacctgccgctccaacatcaccggcctgctgctgacccgcgacggcggcaccaactccaacgagaccgagaccttccgccccgccggcggcgacatgcgcgacaactggcgctccgagctgtacaagtacaaggtggtgaagatcgagcccctgggcgtggcccccacccgctgcaagcgccgcgtggtgggccgccgccgccgccgccgcgccgtgggcatcggcgccgtgttcctgggcttcctgggcgccgccggctccaccatgggcgccgcctccatgaccctgaccgtgcaggcccgcaacctgctgtccggcatcgtgcagcagcagtccaacctgctgcgcgcccccgaggcccagcagcacctgctgaagctgaccgtgtggggcatcaagcagctgcaggcccgcgtgctggccgtggagcgctacctgcgcgaccagcagctgctgggcatctggggctgctccggcaagctgatctgctgcaccaacgtgccctggaactcctcctggtccaaccgcaacctgtccgagatctgggacaacatgacctggctgcagtgggacaaggagatctccaactacacccagatcatctacggcctgctggaggagtcccagaaccagcaggagaagaacgagcaggacctgctggccctggacggaggaggcctggtgccacagcagagcggaggcctgaacgacatcttcgaggcccagaagatcgagtggcacgagggctgataa

SEQ ID NO: 296 - DNA, 2016 bp, synthetic construct
  source 1..2016: mol_type = other DNA
atgggctccctgcagcccctggccaccctgtacctgctgggcatgctggtggcctccgtgctggccgccgagaacctgtgggtgaccgtgtactacggcgtgcccgtgtggaaggaggccaagaccaccctgttctgcgcctccgacgcccgcgcctacgagaaggaggtgcacaacgtgtgggccacccacgcctgcgtgcccaccgacccctccccccaggagctggtgctgggcaacgtgaccgagaacttcaacatgtggaagaacgacatggtggaccagatgcacgaggacatcatctccctgtgggaccagtccctgaagccctgcgtgaagctgacccccctgtgcgtgaccctgatctgctccgacgccggcaacggcagcgtggaggagatgaagaactgctccttcaacaccaccaccgagatccgcgacaaggagaagaaggagtacgccctgttctacaagcccgacatcgtgcccctgtccgagaccaacaacacctccgagtaccgcctgatcaactgcaacacctccgcctgcacccaggcctgccccaaggtgaccttcgagcccatccccatccactactgcgcccccgccggctacgccatcctgaagtgcaacgacgagaccttcaacggcaccggcccctgctccaacgtgtccaccgtgcagtgcacccacggcatccgccccgtggtgtccacccagctgctgctgaacggctccctggccgagaaggagatcgtgatccgctccgagaacctgaccaacaacgccaagatcatcatcgtgcacctgcacacccccgtggagatcgtgtgcacccgccccaacaacaacacccgcaagtccgtgcgcatcggccccggccagaccttctacgccaccggcgacatcatcggcgacatcaagcaggcccactgcaacatctccgaggagaagtggaacgacaccctgcagaaggtgggcatcgagctgcagaagcacttccccaacaagaccatcaagtacaaccagtccgccggcggcgacatggagatcaccacccactccttcaactgcggcggcgagttcttctactgcaacacctccaacctgttcaacggcacctacaacggcacctacatctccaccaactcctccgccaactccacctccaccatcaccctgcagtgccgcatcaagcagatcatcaacatgtggcagggcgtgggccgctgcatgtacgccccccccatcgccggcaacatcacctgccgctccaacatcaccggcctgctgctgacccgcgacggcggcaccaactccaacgagaccgagaccttccgccccgccggcggcgacatgcgcgacaactggcgctccgagctgtacaagtacaaggtggtgaagatcgagcccctgggcgtggcccccacccgctgcaagcgccgcgtggtgggccgccgccgccgccgccgcgccgtgggcatcggcgccgtgttcctgggcttcctgggcgccgccggctccaccatgggcgccgcctccatgaccctgaccgtgcaggcccgcaacctgctgtccggcatcgtgcagcagcagtccaacctgctgcgcgcccccgaggcccagcagcacctgctgaagctgaccgtgtggggcatcaagcagctgcaggcccgcgtgctggccgtggagcgctacctgcgcgaccagcagctgctgggcatctggggctgctccggcaagctgatctgctgcaccaacgtgccctggaactcctcctggtccaaccgcaacctgtccgagatctgggacaacatgacctggctgcagtgggacaaggagatctccaactacacccagatcatctacggcctgctggaggagtcccagaaccagcaggagaagaacgagcaggacctgctggccctggacggaggaggcctggtgccacagcagagcggaggcctgaacgacatcttcgaggcccagaagatcgagtggcacgagggctgataa

SEQ ID NO: 297 - DNA, 2082 bp, synthetic construct
  source 1..2082: mol_type = other DNA
atgggctccctgcagcccctggccaccctgtacctgctgggcatgctggtggcctccgtgctggccgccgagaacctgtgggtgaccgtgtactacggcgtgcccgtgtggaaggaggccaagaccaccctgttctgcgcctccgacgcccgcgcctacgagaaggaggtgcacaacgtgtgggccacccacgcctgcgtgcccaccgacccctccccccaggagctggtgctgggcaacgtgaccgagaacttcaacatgtggaagaacgacatggtggaccagatgcacgaggacatcatctccctgtgggaccagtccctgaagccctgcgtgaagctgacccccctgtgcgtgaccctgatctgctccgacgccggcaacggcagcgtggaggagatgaagaactgctccttcaacaccaccaccgagatccgcgacaaggagaagaaggagtacgccctgttctacaagcccgacatcgtgcccctgtccgagaccaacaacacctccgagtaccgcctgatcaactgcaacacctccgcctgcacccaggcctgccccaaggtgaccttcgagcccatccccatccactactgcgcccccgccggctacgccatcctgaagtgcaacgacgagaccttcaacggcaccggcccctgctccaacgtgtccaccgtgcagtgcacccacggcatccgccccgtggtgtccacccagctgctgctgaacggctccctggccgagaaggagatcgtgatccgctccgagaacctgaccaacaacgccaagatcatcatcgtgcacctgcacacccccgtggagatcgtgtgcacccgccccaacaacaacacccgcaagtccgtgcgcatcggccccggccagaccttctacgccaccggcgacatcatcggcgacatcaagcaggcccactgcaacatctccgaggagaagtggaacgacaccctgcagaaggtgggcatcgagctgcagaagcacttccccaacaagaccatcaagtacaaccagtccgccggcggcgacatggagatcaccacccactccttcaactgcggcggcgagttcttctactgcaacacctccaacctgttcaacggcacctacaacggcacctacatctccaccaactcctccgccaactccacctccaccatcaccctgcagtgccgcatcaagcagatcatcaacatgtggcagggcgtgggccgctgcatgtacgccccccccatcgccggcaacatcacctgccgctccaacatcaccggcctgctgctgacccgcgacggcggcaccaactccaacgagaccgagaccttccgccccgccggcggcgacatgcgcgacaactggcgctccgagctgtacaagtacaaggtggtgaagatcgagcccctgggcgtggcccccacccgctgcaagcgccgcgtggtgggccgccgccgccgccgccgcgccgtgggcatcggcgccgtgttcctgggcttcctgggcgccgccggctccaccatgggcgccgcctccatgaccctgaccgtgcaggcccgcaacctgctgtccggcatcgtgcagcagcagtccaacctgctgcgcgcccccgaggcccagcagcacctgctgaagctgaccgtgtggggcatcaagcagctgcaggcccgcgtgctggccgtggagcgctacctgcgcgaccagcagctgctgggcatctggggctgctccggcaagctgatctgctgcaccaacgtgccctggaactcctcctggtccaaccgcaacctgtccgagatctgggacaacatgacctggctgcagtgggacaaggagatctccaactacacccagatcatctacggcctgctggaggagtcccagaaccagcaggagaagaacgagcaggacctgctggccctggacctggaggtgctgttccagggcccaggccatcaccaccatcaccaccatcatagcgcctggtcccacccccagttcgagaagggcggcggtagtggagggggcggatctggcggctcagcttggagccacccccagttcgaaaagtgataa

SEQ ID NO: 298 - protein, 644 aa, synthetic construct
MGSLQPLATLYLLGMLVASVLAAENLWVTVYYGVPVWKEAKTTLFCASDARAYEKEVHNVWATHACVPTDPSPQELVLGNVTENFNMWKNDMVDQMHEDIISLWDQSLKPCVKLTPLCVTLICSDAGSGGVEEMKNCSFNTTTEIRDKEKKEYALFYKPDIVPLSETNNTSEYRLINCNTSACTQACPKVTFEPIPIHYCAPAGYAILKCNDETFNGTGPCSNVSTVQCTHGIRPVVSTQLLLNGSLAEKEIVIRSENLTNNAKIIIVHLHTPVEIVCTRPNNNTRKSVRIGPGQTFYATGDIIGDIKQAHCNISEEKWNDTLQKVGIELQKHFPNKTIKYNQSAGGDMEITTHSFNCGGEFFYCNTSNLFNGTYNGTYISTNSSANSTSTITLQCRIKQIINMWQGVGRCMYAPPIAGNITCRSNITGLLLTRDGGTNSNETETFRPAGGDMRDNWRSELYKYKVVKIEPLGVAPTRCKRRVVGRRRRRRAVGIGAVFLGFLGAAGSTMGAASMTLTVQARNLLSGIVQQQSNLLRAPEAQQHLLKLTVWGIKQLQARVLAVERYLRDQQLLGIWGCSGKLICCTNVPWNSSWSNRNLSEIWDNMTWLQWDKEISNYTQIIYGLLEESQNQQEKNEQDLLALD

SEQ ID NO: 299 - protein, 622 aa, synthetic construct
AENLWVTVYYGVPVWKEAKTTLFCASDARAYEKEVHNVWATHACVPTDPSPQELVLGNVTENFNMWKNDMVDQMHEDIISLWDQSLKPCVKLTPLCVTLICSDAGSGGVEEMKNCSFNTTTEIRDKEKKEYALFYKPDIVPLSETNNTSEYRLINCNTSACTQACPKVTFEPIPIHYCAPAGYAILKCNDETFNGTGPCSNVSTVQCTHGIRPVVSTQLLLNGSLAEKEIVIRSENLTNNAKIIIVHLHTPVEIVCTRPNNNTRKSVRIGPGQTFYATGDIIGDIKQAHCNISEEKWNDTLQKVGIELQKHFPNKTIKYNQSAGGDMEITTHSFNCGGEFFYCNTSNLFNGTYNGTYISTNSSANSTSTITLQCRIKQIINMWQGVGRCMYAPPIAGNITCRSNITGLLLTRDGGTNSNETETFRPAGGDMRDNWRSELYKYKVVKIEPLGVAPTRCKRRVVGRRRRRRAVGIGAVFLGFLGAAGSTMGAASMTLTVQARNLLSGIVQQQSNLLRAPEAQQHLLKLTVWGIKQLQARVLAVERYLRDQQLLGIWGCSGKLICCTNVPWNSSWSNRNLSEIWDNMTWLQWDKEISNYTQIIYGLLEESQNQQEKNEQDLLALD

SEQ ID NO: 300 - protein, 646 aa, synthetic construct
MPMGSLQPLATLYLLGMLVASVLAAENLWVTVYYGVPVWKEAKTTLFCASDARAYEKEVHNVWATHACVPTDPSPQELVLGNVTENFNMWKNDMVDQMHEDIISLWDQSLKPCVKLTPLCVTLICSDAGSGGVEEMKNCSFNTTTEIRDKKKKEYALFYKPDIVPLSETNNTSEYRLINCNTSACTQACPKVTFEPIPIHYCAPAGYAILKCNNETFNGTGPCSNVSTVQCTHGIRPVVSTQLLLNGSLAEKEIVIRSENLTNNAKIIIVHLNTSVEIVCTRPNNNTRKSVRIGPGQTFYATGDIIGDIKQAHCNISEEKWNDTLQKVGIELQKHFPNKTIKYNQSAGGDMEITTHSFNCGGEFFYCNTSNLFNGTYNGTYISTNSSANSTSTITLQCRIKQIINMWQGVGRCMYAPPIAGNITCRSNITGLLLTRDGGTNSNETETFRPAGGDMRDNWRSELYKYKVVKIEPLGVAPTRCKRRVVGRRRRRRAVGIGAVFLGFLGAAGSTMGAASMTLTVQARNLLSGIVQQQSNLLRAPEAQQHLLKLTVWGIKQLQARVLAVERYLRDQQLLGIWGCSGKLICCTNVPWNSSWSNRNLSEIWDNMTWLQWDKEISNYTQIIYGLLEESQNQQEKNEQDLLALD

SEQ ID NO: 301 - protein, 814 aa, synthetic construct
MPMGSLQPLATLYLLGMLVASVLAAENLWVTVYYGVPVWKEAKTTLFCASDARAYEKEVHNVWATHACVPTDPSPQELVLGNVTENFNMWKNDMVDQMHEDIISLWDQSLKPCVKLTPLCVTLICSDAGSGGVEEMKNCSFNTTTEIRDKKKKEYALFYKPDIVPLSETNNTSEYRLINCNTSACTQACPKVTFEPIPIHYCAPAGYAILKCNNETFNGTGPCSNVSTVQCTHGIRPVVSTQLLLNGSLAEKEIVIRSENLTNNAKIIIVHLNTSVEIVCTRPNNNTRKSVRIGPGQTFYATGDIIGDIKQAHCNISEEKWNDTLQKVGIELQKHFPNKTIKYNQSAGGDMEITTHSFNCGGEFFYCNTSNLFNGTYNGTYISTNSSANSTSTITLQCRIKQIINMWQGVGRCMYAPPIAGNITCRSNITGLLLTRDGGTNSNETETFRPAGGDMRDNWRSELYKYKVVKIEPLGVAPTRCKRRVVGRRRRRRAVGIGAVFLGFLGAAGSTMGAASMTLTVQARNLLSGIVQQQSNLLRAPEAQQHLLKLTVWGIKQLQARVLAVERYLRDQQLLGIWGCSGKLICCTNVPWNSSWSNRNLSEIWDNMTWLQWDKEISNYTQIIYGLLEESQNQQEKNEQDLLALDSGGDIIKLLNEQVNKEMQSSNLYMSMSSWCYTHSLDGAGLFLFDHAAEEYEHAKKLIIFLNENNVPVQLTSISAPEHKFEGLTQIFQKAYEHEQHISESINNIVDHAIKSKDHATFNFLQWYVAEQHEEEVLFKDILDKIELIGNENHGLYLADQYVKGIAKSRKSGS

SEQ ID NO: 302 - protein, 814 aa, synthetic construct
MPMGSLQPLATLYLLGMLVASVLAAENLWVTVYYGVPVWKEAKTTLFCASDARAYEKEVHNVWATHACVPTDPSPQELVLGNVTENFNMWKNDMVDQMHEDIISLWDQSLKPCVKLTPLCVTLICSDAGNGSVEEMKNCSFNTTTEIRDKKKKEYALFYKPDIVPLSETNNTSEYRLINCNTSACTQACPKVTFEPIPIHYCAPAGYAILKCNNETFNGTGPCSNVSTVQCTHGIRPVVSTQLLLNGSLAEKEIVIRSENLTNNAKIIIVHLNTSVEIVCTRPNNNTRKSVRIGPGQTFYATGDIIGDIKQAHCNISEEKWNDTLQKVGIELQKHFPNKTIKYNQSAGGDMEITTHSFNCGGEFFYCNTSNLFNGTYNGTYISTNSSANSTSTITLQCRIKQIINMWQGVGRCMYAPPIAGNITCRSNITGLLLTRDGGTNSNETETFRPAGGDMRDNWRSELYKYKVVKIEPLGVAPTRCKRRVVGRRRRRRAVGIGAVFLGFLGAAGSTMGAASMTLTVQARNLLSGIVQQQSNLLRAPEAQQHLLKLTVWGIKQLQARVLAVERYLRDQQLLGIWGCSGKLICCTNVPWNSSWSNRNLSEIWDNMTWLQWDKEISNYTQIIYGLLEESQNQQEKNEQDLLALDSGGDIIKLLNEQVNKEMQSSNLYMSMSSWCYTHSLDGAGLFLFDHAAEEYEHAKKLIIFLNENNVPVQLTSISAPEHKFEGLTQIFQKAYEHEQHISESINNIVDHAIKSKDHATFNFLQWYVAEQHEEEVLFKDILDKIELIGNENHGLYLADQYVKGIAKSRKSGS

SEQ ID NO: 303 - protein, 814 aa, synthetic construct
MPMGSLQPLATLYLLGMLVASVLAAENLWVTVYYGVPVWKEAKTTLFCASDARAYEKEVHNVWATHACVPTDPSPQELVLGNVTENFNMWKNDMVDQMHEDIISLWDQSLKPCVKLTPLCVTLICSDAGNGSVEEMKNCSFNTTTEIRDKKKKEYALFYKPDIVPLSETNNTSEYRLINCNTSACTQACPKVTFEPIPIHYCAPAGYAILKCNNETFNGTGPCSNVSTVQCTHGIRPVVSTQLLLNGSLAEKEIVIRSENLTNNAKIIIVHLNTSVEIVCTRPNNNTRKSVRIGPGQTFYATGDIIGDIKQAHCNISEEKWNDTLQKVGIELQKHFPNKTIKYNQSAGGDMEITTHSFNCGGEFFYCNTSNLFNGTYNGTYISTNSSAASTSTITLQCRIKQIINMWQGVGRCMYAPPIAGAITCRSNITGLLLTRDGGTNSNETETFRPAGGDMRDNWRSELYKYKVVKIEPLGVAPTRCKRRVVGRRRRRRAVGIGAVFLGFLGAAGSTMGAASMTLTVQARNLLSGIVQQQSNLLRAPEAQQHLLKLTVWGIKQLQARVLAVERYLRDQQLLGIWGCSGKLICCTNVPWNSSWSNRNLSEIWDNMTWLQWDKEISNYTQIIYGLLEESQNQQEKNEQDLLALDSGGDIIKLLNEQVNKEMQSSNLYMSMSSWCYTHSLDGAGLFLFDHAAEEYEHAKKLIIFLNENNVPVQLTSISAPEHKFEGLTQIFQKAYEHEQHISESINNIVDHAIKSKDHATFNFLQWYVAEQHEEEVLFKDILDKIELIGNENHGLYLADQYVKGIAKSRKSGS

SEQ ID NO: 304 - protein, 672 aa, synthetic construct
MPMGSLQPLATLYLLGMLVASVLAAENLWVTVYYGVPVWKEAKTTLFCASDARAYEKEVHNVWATHACVPTDPSPQELVLGNVTENFNMWKNDMVDQMHEDIISLWDQSLKPCVKLTPLCVTLICSDAGSGGVEEMKNCSFNTTTEIRDKKKKEYALFYKPDIVPLSETNNTSEYRLINCNTSACTQACPKVTFEPIPIHYCAPAGYAILKCNNETFNGTGPCSNVSTVQCTHGIRPVVSTQLLLNGSLAEKEIVIRSENLTNNAKIIIVHLNTSVEIVCTRPNNNTRKSVRIGPGQTFYATGDIIGDIKQAHCNISEEKWNDTLQKVGIELQKHFPNKTIKYNQSAGGDMEITTHSFNCGGEFFYCNTSNLFNGTYNGTYISTNSSANSTSTITLQCRIKQIINMWQGVGRCMYAPPIAGNITCRSNITGLLLTRDGGTNSNETETFRPAGGDMRDNWRSELYKYKVVKIEPLGVAPTRCKRRVVGRRRRRRAVGIGAVFLGFLGAAGSTMGAASMTLTVQARNLLSGIVQQQSNLLRAPEAQQHLLKLTVWGIKQLQARVLAVERYLRDQQLLGIWGCSGKLICCTNVPWNSSWSNRNLSEIWDNMTWLQWDKEISNYTQIIYGLLEESQNQQEKNEQDLLALDGGGLVPQQSGGLNDIFEAQKIEWHEG

SEQ ID NO: 305 - protein, 646 aa, synthetic construct
MPMGSLQPLATLYLLGMLVASVLAAENLWVTVYYGVPVWKEAKTTLFCASDARAYEKEVHNVWATHACVPTDPSPQELVLGNVTENFNMWKNDMVDQMHEDIISLWDQSLKPCVKLTPLCVTLICSDAGNGSVEEMKNCSFNTTTEIRDKKKKEYALFYKPDIVPLSETNNTSEYRLINCNTSACTQACPKVTFEPIPIHYCAPAGYAILKCNNETFNGTGPCSNVSTVQCTHGIRPVVSTQLLLNGSLAEKEIVIRSENLTNNAKIIIVHLNTSVEIVCTRPNNNTRKSVRIGPGQTFYATGDIIGDIKQAHCNISEEKWNDTLQKVGIELQKHFPNKTIKYNQSAGGDMEITTHSFNCGGEFFYCNTSNLFNGTYNGTYISTNSSANSTSTITLQCRIKQIINMWQGVGRCMYAPPIAGNITCRSNITGLLLTRDGGTNSNETETFRPAGGDMRDNWRSELYKYKVVKIEPLGVAPTRCKRRVVGRRRRRRAVGIGAVFLGFLGAAGSTMGAASMTLTVQARNLLSGIVQQQSNLLRAPEAQQHLLKLTVWGIKQLQARVLAVERYLRDQQLLGIWGCSGKLICCTNVPWNSSWSNRNLSEIWDNMTWLQWDKEISNYTQIIYGLLEESQNQQEKNEQDLLALD

SEQ ID NO: 306 - protein, 672 aa, synthetic construct
MPMGSLQPLATLYLLGMLVASVLAAENLWVTVYYGVPVWKEAKTTLFCASDARAYEKEVHNVWATHACVPTDPSPQELVLGNVTENFNMWKNDMVDQMHEDIISLWDQSLKPCVKLTPLCVTLICSDAGNGSVEEMKNCSFNTTTEIRDKKKKEYALFYKPDIVPLSETNNTSEYRLINCNTSACTQACPKVTFEPIPIHYCAPAGYAILKCNNETFNGTGPCSNVSTVQCTHGIRPVVSTQLLLNGSLAEKEIVIRSENLTNNAKIIIVHLNTSVEIVCTRPNNNTRKSVRIGPGQTFYATGDIIGDIKQAHCNISEEKWNDTLQKVGIELQKHFPNKTIKYNQSAGGDMEITTHSFNCGGEFFYCNTSNLFNGTYNGTYISTNSSANSTSTITLQCRIKQIINMWQGVGRCMYAPPIAGNITCRSNITGLLLTRDGGTNSNETETFRPAGGDMRDNWRSELYKYKVVKIEPLGVAPTRCKRRVVGRRRRRRAVGIGAVFLGFLGAAGSTMGAASMTLTVQARNLLSGIVQQQSNLLRAPEAQQHLLKLTVWGIKQLQARVLAVERYLRDQQLLGIWGCSGKLICCTNVPWNSSWSNRNLSEIWDNMTWLQWDKEISNYTQIIYGLLEESQNQQEKNEQDLLALDGGGLVPQQSGGLNDIFEAQKIEWHEG

SEQ ID NO: 307 - protein, 692 aa, synthetic construct
MGSLQPLATLYLLGMLVASVLAAENLWVTVYYGVPVWKEAKTTLFCASDARAYEKEVHNVWATHACVPTDPSPQELVLGNVTENFNMWKNDMVDQMHEDIISLWDQSLKPCVKLTPLCVTLICSDAGSGGVEEMKNCSFNTTTEIRDKEKKEYALFYKPDIVPLSETNNTSEYRLINCNTSACTQACPKVTFEPIPIHYCAPAGYAILKCNDETFNGTGPCSNVSTVQCTHGIRPVVSTQLLLNGSLAEKEIVIRSENLTNNAKIIIVHLHTPVEIVCTRPNNNTRKSVRIGPGQTFYATGDIIGDIKQAHCNISEEKWNDTLQKVGIELQKHFPNKTIKYNQSAGGDMEITTHSFNCGGEFFYCNTSNLFNGTYNGTYISTNSSANSTSTITLQCRIKQIINMWQGVGRCMYAPPIAGNITCRSNITGLLLTRDGGTNSNETETFRPAGGDMRDNWRSELYKYKVVKIEPLGVAPTRCKRRVVGRRRRRRAVGIGAVFLGFLGAAGSTMGAASMTLTVQARNLLSGIVQQQSNLLRAPEAQQHLLKLTVWGIKQLQARVLAVERYLRDQQLLGIWGCSGKLICCTNVPWNSSWSNRNLSEIWDNMTWLQWDKEISNYTQIIYGLLEESQNQQEKNEQDLLALDLEVLFQGPGHHHHHHHHSAWSHPQFEKGGGSGGGGSGGSAWSHPQFEK

SEQ ID NO: 308 - protein, 670 aa, synthetic construct
MGSLQPLATLYLLGMLVASVLAAENLWVTVYYGVPVWKEAKTTLFCASDARAYEKEVHNVWATHACVPTDPSPQELVLGNVTENFNMWKNDMVDQMHEDIISLWDQSLKPCVKLTPLCVTLICSDAGSGGVEEMKNCSFNTTTEIRDKEKKEYALFYKPDIVPLSETNNTSEYRLINCNTSACTQACPKVTFEPIPIHYCAPAGYAILKCNDETFNGTGPCSNVSTVQCTHGIRPVVSTQLLLNGSLAEKEIVIRSENLTNNAKIIIVHLHTPVEIVCTRPNNNTRKSVRIGPGQTFYATGDIIGDIKQAHCNISEEKWNDTLQKVGIELQKHFPNKTIKYNQSAGGDMEITTHSFNCGGEFFYCNTSNLFNGTYNGTYISTNSSANSTSTITLQCRIKQIINMWQGVGRCMYAPPIAGNITCRSNITGLLLTRDGGTNSNETETFRPAGGDMRDNWRSELYKYKVVKIEPLGVAPTRCKRRVVGRRRRRRAVGIGAVFLGFLGAAGSTMGAASMTLTVQARNLLSGIVQQQSNLLRAPEAQQHLLKLTVWGIKQLQARVLAVERYLRDQQLLGIWGCSGKLICCTNVPWNSSWSNRNLSEIWDNMTWLQWDKEISNYTQIIYGLLEESQNQQEKNEQDLLALDGGGLVPQQSGGLNDIFEAQKIEWHEG

SEQ ID NO: 309 - protein, 670 aa, synthetic construct
MGSLQPLATLYLLGMLVASVLAAENLWVTVYYGVPVWKEAKTTLFCASDARAYEKEVHNVWATHACVPTDPSPQELVLGNVTENFNMWKNDMVDQMHEDIISLWDQSLKPCVKLTPLCVTLICSDAGNGSVEEMKNCSFNTTTEIRDKEKKEYALFYKPDIVPLSETNNTSEYRLINCNTSACTQACPKVTFEPIPIHYCAPAGYAILKCNDETFNGTGPCSNVSTVQCTHGIRPVVSTQLLLNGSLAEKEIVIRSENLTNNAKIIIVHLHTPVEIVCTRPNNNTRKSVRIGPGQTFYATGDIIGDIKQAHCNISEEKWNDTLQKVGIELQKHFPNKTIKYNQSAGGDMEITTHSFNCGGEFFYCNTSNLFNGTYNGTYISTNSSANSTSTITLQCRIKQIINMWQGVGRCMYAPPIAGNITCRSNITGLLLTRDGGTNSNETETFRPAGGDMRDNWRSELYKYKVVKIEPLGVAPTRCKRRVVGRRRRRRAVGIGAVFLGFLGAAGSTMGAASMTLTVQARNLLSGIVQQQSNLLRAPEAQQHLLKLTVWGIKQLQARVLAVERYLRDQQLLGIWGCSGKLICCTNVPWNSSWSNRNLSEIWDNMTWLQWDKEISNYTQIIYGLLEESQNQQEKNEQDLLALDGGGLVPQQSGGLNDIFEAQKIEWHEG

SEQ ID NO: 310 - protein, 692 aa, synthetic construct
MGSLQPLATLYLLGMLVASVLAAENLWVTVYYGVPVWKEAKTTLFCASDARAYEKEVHNVWATHACVPTDPSPQELVLGNVTENFNMWKNDMVDQMHEDIISLWDQSLKPCVKLTPLCVTLICSDAGNGSVEEMKNCSFNTTTEIRDKEKKEYALFYKPDIVPLSETNNTSEYRLINCNTSACTQACPKVTFEPIPIHYCAPAGYAILKCNDETFNGTGPCSNVSTVQCTHGIRPVVSTQLLLNGSLAEKEIVIRSENLTNNAKIIIVHLHTPVEIVCTRPNNNTRKSVRIGPGQTFYATGDIIGDIKQAHCNISEEKWNDTLQKVGIELQKHFPNKTIKYNQSAGGDMEITTHSFNCGGEFFYCNTSNLFNGTYNGTYISTNSSANSTSTITLQCRIKQIINMWQGVGRCMYAPPIAGNITCRSNITGLLLTRDGGTNSNETETFRPAGGDMRDNWRSELYKYKVVKIEPLGVAPTRCKRRVVGRRRRRRAVGIGAVFLGFLGAAGSTMGAASMTLTVQARNLLSGIVQQQSNLLRAPEAQQHLLKLTVWGIKQLQARVLAVERYLRDQQLLGIWGCSGKLICCTNVPWNSSWSNRNLSEIWDNMTWLQWDKEISNYTQIIYGLLEESQNQQEKNEQDLLALDLEVLFQGPGHHHHHHHHSAWSHPQFEKGGGSGGGGSGGSAWSHPQFEK

SEQ ID NO: 311 - DNA, 2454 bp, synthetic construct
  source 1..2454: mol_type = other DNA
atgcctatgggatctctgcagcctctggccacactgtacctgctgggaatgctggtggcttctgtgctggccgccgagaatctgtgggtcacagtgtactatggcgtgcccgtgtggaaagaggccaagaccacactgttctgcgcctccgatgccagagcctacgagaaagaggtgcacaacgtctgggccacacacgcctgtgtgcctaccgatccatctcctcaagagctggtgctgggcaacgtgaccgagaacttcaacatgtggaagaacgacatggtggaccagatgcacgaggacatcatcagcctgtgggaccagagcctgaagccttgcgtgaagctgacccctctgtgcgtgaccctgatctgttctgacgccaccgtgaaaaccggcaccgtggaagagatgaagaactgcagcttcaacaccaccaccgagatccgggacaagaagaagaaagagtacgccctgttctacaagcccgacatcgtgcccctgagcgagacaaacaacaccagcgagtaccggctgatcaactgcaacacctccgcctgcactcaggcctgtcctaaagtgaccttcgagcccattcctatccactactgtgcccctgccggctacgccatcctgaagtgcaacaacgagacattcaacggcacaggcccctgcagcaatgtgtccaccgtgcagtgtacccacggcatcagaccagtggtgtctacccagctgctgctgaatggaagcctggccgagaaagaaatcgtgatcagaagcgagaacctgaccaacaacgccaagatcatcatcgtccacctgaataccagcgtggaaatcgtgtgcacccggcctaacaacaacacccggaagtctgtgcggatcggccctggccagacattctatgccaccggcgatatcatcggcgacatcaaacaggcccactgtaacatcagcgaggaaaagtggaacgacaccctgcagaaagtgggcatcgagctgcagaagcacttccccaacaagaccatcaagtacaaccagagcgctggcggcgacatggaaatcaccacacacagcttcaattgtggcggcgagttcttctactgcaataccagcaacctgttcaacgggacctacaatggcacctacatcagcaccaacagcagcgccaactccaccagcaccatcactctgcagtgccggatcaagcagatcatcaatatgtggcaaggcgtcggccggtgtatgtacgcccctcctatcgccggcaacatcacctgtcggagcaatatcacaggcctgctgctcaccagagatggcggcaccaatagcaacgaaaccgaaaccttcagacctgccggcggagacatgagagacaattggagaagcgagctgtacaagtacaaggtggtcaagatcgagcccctgggcgtcgcacctacacggtgcaagagaagagtcgtgggccgtcgtagaaggcggagagccgttggaattggcgccgtgttcctgggctttctgggagccgctggatctacaatgggcgctgccagcatgaccctgacagtgcaggctagaaatctgctgagcggcatcgtgcagcagcagagcaatctgctcagagcccctgaggctcagcagcacctcctgaaactgacagtgtggggcatcaagcagctgcaggcaagagtgctggcagtggaaagatacctgcgggaccagcagctcctcggaatctggggatgtagcggcaagctgatctgctgcaccaacgtgccctggaacagctcctggtccaacagaaacctgtccgagatctgggataacatgacctggctgcagtgggacaaagagatcagcaactacacccagatcatctacggcctgctggaagagagccagaaccagcaagagaaaaacgagcaggacctgctggccctggattctggcggagacattatcaagctgctgaacgagcaagtgaacaaagaaatgcagtcctccaacctgtacatgagcatgagcagctggtgttacacccacagccttgatggcgccggactgttcctgtttgatcacgccgccgaggaatacgagcacgccaagaagctgatcatcttcctgaacgagaacaatgtgcccgtgcagctgaccagcattagcgccccagagcacaagttcgagggcctgacacagatctttcagaaggcctacgaacacgagcagcacatctccgagagcatcaacaacatcgtggaccacgccattaagagcaaggatcacgccaccttcaattttctgcagtggtacgtggccgaacagcacgaggaagaagtgctgttcaaggacatcctggacaagattgagctgatcggcaacgagaaccacggcctgtatctggccgaccagtacgtgaagggaatcgccaagagccggaagtccggctcctgatga

SEQ ID NO: 312 - DNA, 1968 bp, synthetic construct
  source 1..1968: mol_type = other DNA
gtcgacgccaccatgcctatgggatctctgcagcctctggccacactgtacctgctgggaatgctggtggcttctgtgctggccgccgagaatctgtgggtcacagtgtactatggcgtgcccgtgtggaaagaggccaagaccacactgttctgcgcctccgatgccagagcctacgagaaagaggtgcacaacgtctgggccacacacgcctgtgtgcctaccgatccatctcctcaagagctggtgctgggcaacgtgaccgagaacttcaacatgtggaagaacgacatggtggaccagatgcacgaggacatcatcagcctgtgggaccagagcctgaagccttgcgtgaagctgacccctctgtgcgtgaccctgatctgttctgacgccaccgtgaaaaccggcaccgtggaagagatgaagaactgcagcttcaacaccaccaccgagatccgggacaagaagaagaaagagtacgccctgttctacaagcccgacatcgtgcccctgagcgagacaaacaacaccagcgagtaccggctgatcaactgcaacacctccgcctgcactcaggcctgtcctaaagtgaccttcgagcccattcctatccactactgtgcccctgccggctacgccatcctgaagtgcaacaacgagacattcaacggcacaggcccctgcagcaatgtgtccaccgtgcagtgtacccacggcatcagaccagtggtgtctacccagctgctgctgaatggaagcctggccgagaaagaaatcgtgatcagaagcgagaacctgaccaacaacgccaagatcatcatcgtccacctgaataccagcgtggaaatcgtgtgcacccggcctaacaacaacacccggaagtctgtgcggatcggccctggccagacattctatgccaccggcgatatcatcggcgacatcaagcaggcccactgcaacatcagcgaggaaaagtggaacgacaccctgcagaaagtgggcatcgagctgcagaagcacttccccaacaagaccatcaagtacaaccagagcgctggcggcgacatggaaatcaccacacacagcttcaattgtggcggcgagttcttctactgcaataccagcaacctgttcaacgggacctacaatggcacctacatcagcaccaacagcagcgccaactccaccagcaccatcactctgcagtgccggatcaagcagatcatcaatatgtggcaaggcgtcggccggtgtatgtacgcccctcctatcgccggcaacatcacctgtcggagcaatatcacaggcctgctgctcaccagagatggcggcaccaatagcaacgaaaccgaaaccttcagacctgccggcggagacatgagagacaattggagaagcgagctgtacaagtacaaggtggtcaagatcgagcccctgggcgtcgcacctacacggtgcaagagaagagtcgtgggccgtcgtagaaggcggagagccgttggaattggcgccgtgttcctgggctttctgggagccgctggatctacaatgggcgctgccagcatgaccctgacagtgcaggctagaaatctgctgagcggcatcgtgcagcagcagagcaatctgctcagagcccctgaggctcagcagcacctcctgaaactgacagtgtggggaatcaagcagctgcaggccagagtgctggcagtggaaagatacctgagggaccagcagctcctcggaatctggggctgttctggcaagctgatctgctgcaccaacgtgccctggaacagctcctggtccaacagaaacctgtccgagatctgggataacatgacctggctgcagtgggacaaagagatcagcaactacacccagatcatctacggcctgctggaagagagccagaaccagcaagagaaaaacgagcaggacctgctggccctggattgatgaggatcc

SEQ ID NO: 313 - DNA, 1968 bp, synthetic construct
  source 1..1968: mol_type = other DNA
gtcgacgccaccatgcctatgggatctctgcagcctctggccacactgtacctgctgggaatgctggtggcttctgtgctggccgccgagaatctgtgggtcacagtgtactatggcgtgcccgtgtggaaagaggccaagaccacactgttctgcgcctccgatgccagagcctacgagaaagaggtgcacaacgtctgggccacacacgcctgtgtgcctaccgatccatctcctcaagagctggtgctgggcaacgtgaccgagaacttcaacatgtggaagaacgacatggtggaccagatgcacgaggacatcatcagcctgtgggaccagagcctgaagccttgcgtgaagctgacccctctgtgcgtgaccctgatctgttctaacgccaccgtgaaaaacggcaccgtggaagagatgaagaactgcagcttcaacaccaccaccgagatccgggacaagaagaagaaagagtacgccctgttctacaagcccgacatcgtgcccctgagcgagacaaacaacaccagcgagtaccggctgatcaactgcaacacctccgcctgcactcaggcctgtcctaaagtgaccttcgagcccattcctatccactactgtgcccctgccggctacgccatcctgaagtgcaacaacgagacattcaacggcacaggcccctgcagcaatgtgtccaccgtgcagtgtacccacggcatcagaccagtggtgtctacccagctgctgctgaatggaagcctggccgagaaagaaatcgtgatcagaagcgagaacctgaccaacaacgccaagatcatcatcgtccacctgaataccagcgtggaaatcgtgtgcacccggcctaacaacaacacccggaagtctgtgcggatcggccctggccagacattctatgccaccggcgatatcatcggcgacatcaagcaggcccactgcaacatcagcgaggaaaagtggaacgacaccctgcagaaagtgggcatcgagctgcagaagcacttccccaacaagaccatcaagtacaaccagagcgctggcggcgacatggaaatcaccacacacagcttcaattgtggcggcgagttcttctactgcaataccagcaacctgttcaacgggacctacaatggcacctacatcagcaccaacagcagcgccaactccaccagcaccatcactctgcagtgccggatcaagcagatcatcaatatgtggcaaggcgtcggccggtgtatgtacgcccctcctatcgccggcaacatcacctgtcggagcaatatcacaggcctgctgctcaccagagatggcggcaccaatagcaacgaaaccgaaaccttcagacctgccggcggagacatgagagacaattggagaagcgagctgtacaagtacaaggtggtcaagatcgagcccctgggcgtcgcacctacacggtgcaagagaagagtcgtgggccgtcgtagaaggcggagagccgttggaattggcgccgtgttcctgggctttctgggagccgctggatctacaatgggcgctgccagcatgaccctgacagtgcaggctagaaatctgctgagcggcatcgtgcagcagcagagcaatctgctcagagcccctgaggctcagcagcacctcctgaaactgacagtgtggggaatcaagcagctgcaggccagagtgctggcagtggaaagatacctgagggaccagcagctcctcggaatctggggctgttctggcaagctgatctgctgcaccaacgtgccctggaacagctcctggtccaacagaaacctgtccgagatctgggataacatgacctggctgcagtgggacaaagagatcagcaactacacccagatcatctacggcctgctggaagagagccagaaccagcaagagaaaaacgagcaggacctgctggccctggattgatgaggatcc

SEQ ID NO: 314 - DNA, 2472 bp, synthetic construct
  source 1..2472: mol_type = other DNA
gtcgacgccaccatgcctatgggatctctgcagcctctggccacactgtacctgctgggaatgctggtggcttctgtgctggccgccgagaatctgtgggtcacagtgtactatggcgtgcccgtgtggaaagaggccaagaccacactgttctgcgcctccgatgccagagcctacgagaaagaggtgcacaacgtctgggccacacacgcctgtgtgcctaccgatccatctcctcaagagctggtgctgggcaacgtgaccgagaacttcaacatgtggaagaacgacatggtggaccagatgcacgaggacatcatcagcctgtgggaccagagcctgaagccttgcgtgaagctgacccctctgtgcgtgaccctgatctgttctaacgccaccgtgaaaaacggcaccgtggaagagatgaagaactgcagcttcaacaccaccaccgagatccgggacaagaagaagaaagagtacgccctgttctacaagcccgacatcgtgcccctgagcgagacaaacaacaccagcgagtaccggctgatcaactgcaacacctccgcctgcactcaggcctgtcctaaagtgaccttcgagcccattcctatccactactgtgcccctgccggctacgccatcctgaagtgcaacaacgagacattcaacggcacaggcccctgcagcaatgtgtccaccgtgcagtgtacccacggcatcagaccagtggtgtctacccagctgctgctgaatggaagcctggccgagaaagaaatcgtgatcagaagcgagaacctgaccaacaacgccaagatcatcatcgtccacctgaataccagcgtggaaatcgtgtgcacccggcctaacaacaacacccggaagtctgtgcggatcggccctggccagacattctatgccaccggcgatatcatcggcgacatcaaacaggcccactgtaacatcagcgaggaaaagtggaacgacaccctgcagaaagtgggcatcgagctgcagaagcacttccccaacaagaccatcaagtacaaccagagcgctggcggcgacatggaaatcaccacacacagcttcaattgtggcggcgagttcttctactgcaataccagcaacctgttcaacgggacctacaatggcacctacatcagcaccaacagcagcgccaactccaccagcaccatcactctgcagtgccggatcaagcagatcatcaatatgtggcaaggcgtcggccggtgtatgtacgcccctcctatcgccggcaacatcacctgtcggagcaatatcacaggcctgctgctcaccagagatggcggcaccaatagcaacgaaaccgaaaccttcagacctgccggcggagacatgagagacaattggagaagcgagctgtacaagtacaaggtggtcaagatcgagcccctgggcgtcgcacctacacggtgcaagagaagagtcgtgggccgtcgtagaaggcggagagccgttggaattggcgccgtgttcctgggctttctgggagccgctggatctacaatgggcgctgccagcatgaccctgacagtgcaggctagaaatctgctgagcggcatcgtgcagcagcagagcaatctgctcagagcccctgaggctcagcagcacctcctgaaactgacagtgtggggcatcaagcagctgcaggcaagagtgctggcagtggaaagatacctgcgggaccagcagctcctcggaatctggggatgtagcggcaagctgatctgctgcaccaacgtgccctggaacagctcctggtccaacagaaacctgtccgagatctgggataacatgacctggctgcagtgggacaaagagatcagcaactacacccagatcatctacggcctgctggaagagagccagaaccagcaagagaaaaacgagcaggacctgctggccctggattctggcggagacattatcaagctgctgaacgagcaagtgaacaaagaaatgcagtcctccaacctgtacatgagcatgagcagctggtgttacacccacagccttgatggcgccggactgttcctgtttgatcacgccgccgaggaatacgagcacgccaagaagctgatcatcttcctgaacgagaacaatgtgcccgtgcagctgaccagcattagcgccccagagcacaagttcgagggcctgacacagatctttcagaaggcctacgaacacgagcagcacatctccgagagcatcaacaacatcgtggaccacgccattaagagcaaggatcacgccaccttcaattttctgcagtggtacgtggccgaacagcacgaggaagaagtgctgttcaaggacatcctggacaagattgagctgatcggcaacgagaaccacggcctgtatctggccgaccagtacgtgaagggaatcgccaagagccggaagtccggctcctgatgaggatcc

SEQ ID NO: 315 - protein, 792 aa, synthetic construct
AENLWVTVYYGVPVWKEAKTTLFCASDARAYEKEVHNVWATHACVPTDPSPQELVLGNVTENFNMWKNDMVDQMHEDIISLWDQSLKPCVKLTPLCVTLICSDATVKTGTVEEMKNCSFNTTTEIRDKKKKEYALFYKPDIVPLSETNNTSEYRLINCNTSACTQACPKVTFEPIPIHYCAPAGYAILKCNNETFNGTGPCSNVSTVQCTHGIRPVVSTQLLLNGSLAEKEIVIRSENLTNNAKIIIVHLNTSVEIVCTRPNNNTRKSVRIGPGQTFYATGDIIGDIKQAHCNISEEKWNDTLQKVGIELQKHFPNKTIKYNQSAGGDMEITTHSFNCGGEFFYCNTSNLFNGTYNGTYISTNSSANSTSTITLQCRIKQIINMWQGVGRCMYAPPIAGNITCRSNITGLLLTRDGGTNSNETETFRPAGGDMRDNWRSELYKYKVVKIEPLGVAPTRCKRRVVGRRRRRRAVGIGAVFLGFLGAAGSTMGAASMTLTVQARNLLSGIVQQQSNLLRAPEAQQHLLKLTVWGIKQLQARVLAVERYLRDQQLLGIWGCSGKLICCTNVPWNSSWSNRNLSEIWDNMTWLQWDKEISNYTQIIYGLLEESQNQQEKNEQDLLALDSGGDIIKLLNEQVNKEMQSSNLYMSMSSWCYTHSLDGAGLFLFDHAAEEYEHAKKLIIFLNENNVPVQLTSISAPEHKFEGLTQIFQKAYEHEQHISESINNIVDHAIKSKDHATFNFLQWYVAEQHEEEVLFKDILDKIELIGNENHGLYLADQYVKGIAKSRKSGS

SEQ ID NO: 316 - protein, 624 aa, synthetic construct
AENLWVTVYYGVPVWKEAKTTLFCASDARAYEKEVHNVWATHACVPTDPSPQELVLGNVTENFNMWKNDMVDQMHEDIISLWDQSLKPCVKLTPLCVTLICSDATVKTGTVEEMKNCSFNTTTEIRDKKKKEYALFYKPDIVPLSETNNTSEYRLINCNTSACTQACPKVTFEPIPIHYCAPAGYAILKCNNETFNGTGPCSNVSTVQCTHGIRPVVSTQLLLNGSLAEKEIVIRSENLTNNAKIIIVHLNTSVEIVCTRPNNNTRKSVRIGPGQTFYATGDIIGDIKQAHCNISEEKWNDTLQKVGIELQKHFPNKTIKYNQSAGGDMEITTHSFNCGGEFFYCNTSNLFNGTYNGTYISTNSSANSTSTITLQCRIKQIINMWQGVGRCMYAPPIAGNITCRSNITGLLLTRDGGTNSNETETFRPAGGDMRDNWRSELYKYKVVKIEPLGVAPTRCKRRVVGRRRRRRAVGIGAVFLGFLGAAGSTMGAASMTLTVQARNLLSGIVQQQSNLLRAPEAQQHLLKLTVWGIKQLQARVLAVERYLRDQQLLGIWGCSGKLICCTNVPWNSSWSNRNLSEIWDNMTWLQWDKEISNYTQIIYGLLEESQNQQEKNEQDLLALD

SEQ ID NO: 317 - protein, 624 aa, synthetic construct
AENLWVTVYYGVPVWKEAKTTLFCASDARAYEKEVHNVWATHACVPTDPSPQELVLGNVTENFNMWKNDMVDQMHEDIISLWDQSLKPCVKLTPLCVTLICSNATVKNGTVEEMKNCSFNTTTEIRDKKKKEYALFYKPDIVPLSETNNTSEYRLINCNTSACTQACPKVTFEPIPIHYCAPAGYAILKCNNETFNGTGPCSNVSTVQCTHGIRPVVSTQLLLNGSLAEKEIVIRSENLTNNAKIIIVHLNTSVEIVCTRPNNNTRKSVRIGPGQTFYATGDIIGDIKQAHCNISEEKWNDTLQKVGIELQKHFPNKTIKYNQSAGGDMEITTHSFNCGGEFFYCNTSNLFNGTYNGTYISTNSSANSTSTITLQCRIKQIINMWQGVGRCMYAPPIAGNITCRSNITGLLLTRDGGTNSNETETFRPAGGDMRDNWRSELYKYKVVKIEPLGVAPTRCKRRVVGRRRRRRAVGIGAVFLGFLGAAGSTMGAASMTLTVQARNLLSGIVQQQSNLLRAPEAQQHLLKLTVWGIKQLQARVLAVERYLRDQQLLGIWGCSGKLICCTNVPWNSSWSNRNLSEIWDNMTWLQWDKEISNYTQIIYGLLEESQNQQEKNEQDLLALD

SEQ ID NO: 318 - protein, 792 aa, synthetic construct
AENLWVTVYYGVPVWKEAKTTLFCASDARAYEKEVHNVWATHACVPTDPSPQELVLGNVTENFNMWKNDMVDQMHEDIISLWDQSLKPCVKLTPLCVTLICSNATVKNGTVEEMKNCSFNTTTEIRDKKKKEYALFYKPDIVPLSETNNTSEYRLINCNTSACTQACPKVTFEPIPIHYCAPAGYAILKCNNETFNGTGPCSNVSTVQCTHGIRPVVSTQLLLNGSLAEKEIVIRSENLTNNAKIIIVHLNTSVEIVCTRPNNNTRKSVRIGPGQTFYATGDIIGDIKQAHCNISEEKWNDTLQKVGIELQKHFPNKTIKYNQSAGGDMEITTHSFNCGGEFFYCNTSNLFNGTYNGTYISTNSSANSTSTITLQCRIKQIINMWQGVGRCMYAPPIAGNITCRSNITGLLLTRDGGTNSNETETFRPAGGDMRDNWRSELYKYKVVKIEPLGVAPTRCKRRVVGRRRRRRAVGIGAVFLGFLGAAGSTMGAASMTLTVQARNLLSGIVQQQSNLLRAPEAQQHLLKLTVWGIKQLQARVLAVERYLRDQQLLGIWGCSGKLICCTNVPWNSSWSNRNLSEIWDNMTWLQWDKEISNYTQIIYGLLEESQNQQEKNEQDLLALDSGGDIIKLLNEQVNKEMQSSNLYMSMSSWCYTHSLDGAGLFLFDHAAEEYEHAKKLIIFLNENNVPVQLTSISAPEHKFEGLTQIFQKAYEHEQHISESINNIVDHAIKSKDHATFNFLQWYVAEQHEEEVLFKDILDKIELIGNENHGLYLADQYVKGIAKSRKSGS

SEQ ID NO: 319 - DNA, 1989 bp, synthetic construct
  source 1..1989: mol_type = other DNA
gtcgacgccaccatgcctatgggatctctgcaacctctggccacactgtacctgctgggaatgctggtggcttctgtgctggccgccgagaatctgtgggtcacagtgtactatggcgtgcccgtgtgggaagatgccgacacacctctgttttgtgccagcgacgccaaggcctacagcaccgagtctcacaatgtgtgggccactcacgcctgcgtgccaaccgatccatctcctcaagagatcagcctggacaacgtgaccgagaacttcaacatgtggaagaacaacatggtcgagcagatgcacgaggacatcatcagcctgtgggacgagagcctgaagccttgcgtgaagctgacccctctgtgcgtgaccctgaactgcaccaacgtgaacaacagcagcgccaccaacaactccatggtggacgatagagagggcctgaagaactgcagcttcaacatcaccaccgagctgcgggacaagaagaagcaagagcacgccctgttctaccggctggacatcgtgcccatcaacggcaacagcaactccaacagctccgtgggcgactacagactgatcaactgcaacgtgtccacatgcaagcaggcctgtcctaagatgagcttcgaccccattcctatccactactgtgcccctgccggcttcgccatcctgaagtgcagagacaagaagttcaacggcaccggcagctgcaagaatgtgtccaccgtgcagtgtacccacggcatcaagcctgtgatcagcacccagctgctgctgaatggctctgtggccgaagaggaaatcatgatccgcagcgagaactttaccaacaacgccaagaacatcatcgtccagttcaacaagaccatcgacatcatgtgcacccggcctaacaacaacacccggaagtccatcagcctcggacctggacaggccatctatgccaccggcgacatcatcggcaatatcagacaggcccactgcaacatctctggcgccgactggggcaacatgatcagaaatgtgtccgagaagctgaaagagatcttcaacaaaaccaccatcaccttcaaggcctccgctggcggcgacctggaaatcaccacacacagcttcaattgcaggggcgagttcttctactgcgacaccagcgacctgttcaactccagcagattcaacaatagcagcaacgacacgaacgacaccatcacactgccctgcaagatcaagcagatcgtgcggatgtggcagcgcgtgggccagtgtatgtatgcccctcctatcgccggcaacatcacatgcagaagcaatatcaccggcctgctgctcaccagagatggcggcggaaacaacaccaacgagacagaaaccttccggcctgccggcggagacatgagagacaattggagaagcgagctgtacaagtacaaggtggtcaagatcgagcccctgggcgtcgcacctacacggtgcaagagaagagtcgtgggccgtcgtagaaggcggagagccgttggaattggcgccgtgttcctgggctttctgggagccgctggatctacaatgggcgctgccagcatgaccctgacagtgcaggctagaaatctgctgagcggcatcgtgcagcagcagagcaatctgctcagagcccctgaggctcagcagcacctcctgaaactgacagtgtggggaatcaagcagctgcaggccagagtgctggctgtggaaagatacctgagggaccagcagctcctcggaatctggggctgttctggcaagctgatctgctgcaccaatgtgccctggaacagctcctggtccaaccggaatctgagcgagatctgggacaatatgacctggctgcagtgggacaaagagattagcaactacacccagatcatctacggactgctggaagagagccagaaccagcaagagaaaaacgagcaggacctgctggccctggactgataaggatcc

SEQ ID NO: 320 - DNA, 1989 bp, synthetic construct
  source 1..1989: mol_type = other DNA
gtcgacgccaccatgcctatgggatctctgcagcctctggccacactgtacctgctgggaatgctggtggctagcgtgctggcctccaacaatctgtgggtcaccgtgtactacggcgtgcccgtttgggaagatgccgacacacctctgttctgtgcctccgatgccaaggcctacagcaccgagtctcacaacgtgtgggccactcatgcctgcgtgccaaccgatccatctcctcaagagatcagcctggacaacgtgaccgagaacttcaacatgtggaagaacaacatggtcgagcagatgcacgaggacatcatcagcctgtgggacgagagcctgaagccttgcgtgaagctgacccctctgtgcgtgaccctgaactgcaccaacgtgaacaacagcagcgccaccaacaactccatggtggacgatagagagggcctgaagaactgcagcttcaacatcaccaccgagctgcgggacaagaagaagcaagagcacgccctgttctaccggctggacatcgtgcccatcaacggcaacagcaactccaacagctccgtgggcgactacagactgatcaactgcaacgtgtccaccatcaagcaggcctgtcctaagatgagcttcgaccccattcctatccactactgtgcccctgccggcttcgccatcctgaagtgcagagacaagaagttcaacggcaccggcagctgcaagaatgtgtccaccgtgcagtgtacccacggcatcaagcctgtgatcagcacccagctgctgctgaatggctctgtggccgaagaggaaatcatgatccgcagcgagaactttaccaacaacgccaagaacatcatcgtccagttcaacaagaccatcgacatcatgtgcacccggcctaacaacaacacccggaagtccatcagcctcggacctggacaggccatctatgccaccggcgacatcatcggcaatatcagacaggcccactgcaacatctctggcgccgactggggcaacatgatcagaaatgtgtccgagaagctgaaagagatcttcaacaaaaccaccatcaccttcaaggcctccgctggcggcgacctggaaatcaccacacacagcttcaattgcaggggcgagttcttctactgcgacaccagcgacctgttcaactccagcagattcaacaatagcagcaacgacacgaacgacaccatcacactgccctgcaagatcaagcagatcgtgcggatgtggcagcgcgttggccaggctatgtatgcccctcctatcgccggcaacatcacatgcagaagcaatatcaccggcctgctgctcaccagagatggcggcggaaacaacaccaacgagacagaaaccttccggcctgccggcggagacatgagagacaattggagaagcgagctgtacaagtacaaggtggtcaagatcaaccctctgggcgtcgcccctaccagatgtagaagaagagtcgtcggcagacggcggaggcggagagctattggaatgggagctgtgctgctgggctttctgggaacagccggctctacaatgggagccgcctctatcaccctgaccgtgcaagttcgacagctgctgtctggcatcgtgcagcagcagagcaacctgctgagagcccctgaagctcagcagcatctcctgcagctgacagtgtggggaatcaagcagctccaggccagaatcctggccgtcgagagatacctgaaggaccagcagctcctcggaatctggggctgttctggcaagctgatctgctgcaccaatgtgccctggaacgccagctggtccaacagaagctacaacgacatctgggagaacctgacctgggtcgagtgggagagagagatctccaactacacccagcagatctacagcctgctggaagagagccagaaccagcaagagaagaacgagcaggacctgctggccctggactgataaggatcc

SEQ ID NO: 321 - DNA, 1989 bp, synthetic construct
  source 1..1989: mol_type = other DNA
gtcgacgccaccatgcctatgggatctctgcagcctctggccacactgtacctgctgggaatgctggtggctagcgtgctggcctccaacaatctgtgggtcaccgtgtactacggcgtgcccgtttgggaagatgccgacacacctctgttctgtgcctccgatgccaaggcctacagcaccgagtctcacaacgtgtgggccactcatgcctgcgtgccaaccgatccatctcctcaagagatcagcctggacaacgtgaccgagaacttcaacatgtggaagaacaacatggtcgagcagatgcacgaggacatcatcagcctgtgggacgagagcctgaagccttgcgtgaagctgacccctctgtgcgtgaccctgaactgcaccaacgtgaacaacagcagcgccaccaacaactccatggtggacgatagagagggcctgaagaactgcagcttcaacatcaccaccgagctgcgggacaagaagaagcaagagcacgccctgttctaccggctggacatcgtgcccatcaacggcaacagcaactccaacagctccgtgggcgactacagactgatcaactgcaacgtgtccacctgcaagcaggcctgtcctaagatgagcttcgaccccattcctatccactactgtgcccctgccggcttcgccatcctgaagtgcagagacaagaagttcaacggcaccggcagctgcaagaatgtgtccaccgtgcagtgtacccacggcatcaagcctgtgatcagcacccagctgctgctgaatggctctgtggccgaagaggaaatcatgatccgcagcgagaactttaccaacaacgccaagaacatcatcgtccagttcaacaagaccatcgacatcatgtgcacccggcctaacaacaacacccggaagtccatcagcctcggacctggacaggccatctatgccaccggcgacatcatcggcaatatcagacaggcccactgcaacatctctggcgccgactggggcaacatgatcagaaatgtgtccgagaagctgaaagagatcttcaacaaaaccaccatcaccttcaaggcctccgctggcggcgacctggaaatcaccacacacagcttcaattgcaggggcgagttcttctactgcgacaccagcgacctgttcaactccagcagattcaacaatagcagcaacgacacgaacgacaccatcacactgccctgcaagatcaagcagatcgtgcggatgtggcagcgcgttggccagtgcatgtatgcccctcctatcgccggcaacatcacatgcagaagcaatatcaccggcctgctgctcaccagagatggcggcggaaacaacaccaacgagacagaaaccttccggcctgccggcggagacatgagagacaattggagaagcgagctgtacaagtacaaggtggtcaagatcaaccctctgggcgtcgcccctaccagatgtagaagaagagtcgtcggcagacggcggaggcggagagctattggaatgggagctgtgctgctgggctttctgggaacagccggctctacaatgggagccgcctctatcaccctgaccgtgcaagttcgacagctgctgtctggcatcgtgcagcagcagagcaacctgctgagagcccctgaagctcagcagcatctcctgcagctgacagtgtggggaatcaagcagctccaggccagaatcctggccgtcgagagatacctgaaggaccagcagctcctcggaatctggggctgttctggcaagctgatctgctgcaccaatgtgccctggaacgccagctggtccaacagaagctacaacgacatctgggagaacctgacctgggtcgagtgggagagagagatctccaactacacccagcagatctacagcctgctggaagagagccagaaccagcaagagaagaacgagcaggacctgctggccctggactgataaggatcc

SEQ ID NO: 322 - DNA, 1950 bp, synthetic construct
  source 1..1950: mol_type = other DNA
gtcgacgccaccatgcctatgggatctctgcagcctctggccacactgtacctgctgggaatgctggtggctagcgtgctggcctccaacaatctgtgggtcaccgtgtactacggcgtgcccgtttgggaagatgccgacacacctctgttctgtgcctccgatgccaaggcctacagcaccgagtctcacaacgtgtgggccactcatgcctgcgtgccaaccgatccatctcctcaagagatcagcctggacaacgtgaccgagaacttcaacatgtggaagaacaacatggtcgagcagatgcacgaggacatcatcagcctgtgggacgagagcctgaagccttgcgtgaagctgacccctctgtgcgtgaccctgaactgcaccaacgtgaacaacagcagcgccaccaacaactccatggtggacgatagagagggcctgaagaactgcagcttcaacatcaccaccgagctgcgggacaagaagaagcaagagcacgccctgttctaccggctggacatcgtgcccatcaacggcaacagcaactccaacagctccgtgggcgactacagactgatcaactgcaacgtgtccacatgcaagcaggcctgtcctaagatgagcttcgaccccattcctatccactactgtgcccctgccggcttcgccatcctgaagtgcagagacaagaagttcaacggcaccggcagctgcaagaatgtgtccaccgtgcagtgtacccacggcatcaagcctgtgatcagcacccagctgctgctgaatggctctgtggccgaagaggaaatcatgatccgcagcgagaactttaccaacaacgccaagaacatcatcgtccagttcaacaagaccatcgacatcatgtgcacccggcctaacaacaacacccggaagtccatcagcctcggacctggacaggccatctatgccaccggcgacatcatcggcaatatcagacaggcccactgcaacatctctggcgccgactggggcaacatgatcagaaatgtgtccgagaagctgaaagagatcttcaacaaaaccaccatcaccttcaaggcctccgctggcggcgacctggaaatcaccacacacagcttcaattgcaggggcgagttcttctactgcgacaccagcgacctgttcaactccagcagattcaacaatagcagcaacgacacgaacgacaccatcacactgccctgcaagatcaagcagatcgtgcggatgtggcagcgcgtgggccagtgtatgtatgcccctcctatcgccggcaacatcacatgcagaagcaatatcaccggcctgctgctcaccagagatggcggcggaaacaacaccaacgagacagaaaccttccggcctgccggcggagacatgagagacaattggagaagcgagctgtacaagtacaaggtggtcaagatcaaccctctgggcgtcgcccctaccagatgtagaagaagagtcgtcggcagacggcggaggcggagagctattggaatgggagctgtgctgctgggctttctgggaacagccggctctacaatgggagccgcctctatcaccctgaccgtgcaagttcgacagctgctgagcggcaaccctgactggctgcctgatatgacagtgtggggaatcaagcagctgcaggccagaatcctggccgtggaaagatacctgaaggaccagcagctcctcggaatctggggctgttctggcaagctgatctgctgcaccaatgtgccctggaacgccagctggtccaacagaagctacaacgacatctgggagaacctgacctgggtcgagtgggagagagagatctccaactacacccagcagatctacagcctgctggaagagagccagaaccagcaagagaagaacgagcaggacctgctggccctggactgataaggatcc

SEQ ID NO: 323 - DNA, 1989 bp, synthetic construct
  source 1..1989: mol_type = other DNA
gtcgacgccaccatgcctatgggatctctgcagcctctggccacactgtacctgctgggaatgctggtggctagcgtgctggcctccaacaatctgtgggtcaccgtgtactacggcgtgcccgtttgggaagatgcctgcacacctctgttctgtgcctccgatgccaaggcctacagcaccaagagcagaaacgtgtgggccacctgttgctgcgtgcccacagatccatctccacaagagatcagcctggacaacgtgaccgagaacttcaacatgtggaagaacaacatggtcgagcagatgcacgaggacatcatcagcctgtgggacgagagcctgaagccttgcgtgaagctgacccctctgtgcgtgaccctgaactgcaccaacgtgaacaacagcagcgccaccaacaactccatggtggacgatagagagggcctgaagaactgcagcttcaacatcaccaccgagctgcgggacaagaagaagcaagagcacgccctgttctaccggctggacatcgtgcccatcaacggcaacagcaactccaacagctccgtgggcgactacagactgatcaactgcaacgtgtccaccatcaagcaggcctgtcctaagatgagcttcgaccccattcctatccactactgtgcccctgccggcttcgccatcctgaagtgcagagacaagaagttcaacggcaccggcagctgcaagaatgtgtccaccgtgcagtgtacccacggcatcaagcctgtgatcagcacccagctgctgctgaatggctctgtggccgaagaggaaatcatgatccgcagcgagaactttaccaacaacgccaagaacatcatcgtccagttcaacaagaccatcgacatcatgtgcacccggcctaacaacaacacccggaagtccatcagcctcggacctggacaagcttggtacgccaccggcgacatcatcggcaatatcagacaggcccactgcaacatctctggcgccgactggggcaacatgatcagaaatgtgtccgagaagctgaaagagatcttcaacaaaaccaccatcaccttcaaggcctccgctggcggcgacctggaaatcaccacacacagcttcaattgcaggggcgagttcttctactgcgacaccagcgacctgttcaactccagcagattcaacaatagcagcaacgacacgaacgacaccatcacactgccctgcaagatcaagcagatcgtgcggatgtggcagcgcgttggccaggctatgtatgcccctcctatcgccggcaacatcacatgcagaagcaatatcaccggcctgctgctcaccagagatggcggcggaaacaacaccaacgagacagagacatttcggcctgccggcggagacatgagagacaattggagaagcgagctgtacaagtacaaggtggtcaagatcaaccctctgggcgtcgcccctaccagatgtagaagaagagtcgtcggcagacggcggaggcggagagctattggaatgggagctgtgctgctgggctttctgggaacagccggctctacaatgggagccgccagcatgacactgaccgtgcaagttcgacagctgctgagcggaatcgtgcagcagcagagcaactgtctgagagcccctgagtgccagcagtgtctgctgcaactgacagtgtggggaatcaagcagctgcaggccagaatcctggccgtggaaagatacctgaaggaccagcagctcctcggaatctggggctgttctggcaagctgatctgctgcaccaatgtgccctggaacgccagctggtccaacagaagctacaacgacatctgggagaacctgacctgggtcgagtgggagagagagatctccaactacacccagcagatctacagcctgctggaagagagccagaaccagcaagagaagaacgagcaggacctgctggccctggactgataaggatcc

SEQ ID NO: 324 - DNA, 1989 bp, synthetic construct
  source 1..1989: mol_type = other DNA
gtcgacgccaccatgcctatgggatctctgcagcctctggccacactgtacctgctgggaatgctggtggctagcgtgctggcctccaacaatctgtgggtcaccgtgtactacggcgtgcccgtttgggaagatgccgagacacctctgttctgtgcctccgatgccaaggcctacagcaccgagaagcacaacgtgtgggccactcatgcctgcgtgccaaccgatccatctcctcaagagatcagcctggacaacgtgaccgagaacttcaacatgtggaagaacaacatggtcgagcagatgcacaccgacatcatcagcctgtgggacgagagcctgaagccttgcgtgaagctgacccctctgtgcgtgaccctgaactgcaccaacgtgaacaacagcagcgccaccaacaactccatggtggacgatagagagggcctgaagaactgcagcttcaacatcaccaccgagctgcgggacaagaaaaaacaggtgcacgccctgttctaccggctggacatcgtgcccatcaacggcaacagcaactccaacagctccgtgggcgactacagactgatcaactgcaacgtgtccaccatcaagcaggcctgtcctaagatgagcttcgaccccattcctatccactactgtgcccctgccggcttcgccatcctgaagtgcagagacaagaagttcaacggcaccggcagctgcaagaatgtgtccaccgtgcagtgtacccacggcatcaagcctgtgatcagcacccagctgctgctgaatggctctgtggccgaagaggaaatcatgatccgcagcgagaactttaccaacaacgccaagaacatcatcgtccagttcaacaagaccatcgacatcatgtgcacccggcctaacaacaacaccagaaagagcatcagactcggcccaggccaggccatctatgccacaggcgatatcatcggcaacatccggcaggcccactgcaatatctctggcgccgattggggcaacatgatccggaacgtgtccgaaaagctgaaagagatcttcaacaaaaccaccatcaccttcaaggcctccgctggcggcgacctggaaatcaccacacacagcttcaattgcaggggcgagttcttctactgcgacaccagcgacctgttcaactccagcagattcaacaatagcagcaacgacacgaacgacaccatcacactgccctgcaagatcaagcagatcgtgcggatgtggcagcgcgttggccaggctatgtatgctcctcctatcgccggcaatatcacctgtcggagcaacattaccggcctgctgctcaccagagatggcggcggaaacaataccaacgagacagaaaccttccggccagccggcggagacatgagagacaattggagaagcgagctgtacaagtacaaggtggtcaagatcaaccctctgggcgtcgcccctaccagatgtagaagaagagtcgtcggcagacggcggaggcggagagctattggaatgggagctgtgctgctgggctttctgggaacagccggctctacaatgggagccgcctctatcaccctgaccgtgcaagtgcgcaatctgctgtctggcatcgtgcagcagcagagcaacctgctgagagcccctgaagctcagcagcatctcctgcagctgacagtgtggggaatcaagcagctccaggccagaatcctggccgtcgagagatacctgagggaccagcagctcctcggaatctggggctgttctggcaagctgatctgctgcaccaatgtgccctggaacgccagctggtccaacagaagctacaacgacatctgggagaacctgacctgggtcgagtgggagagagagatctccaactacacccagcagatctacagcctgctggaagagagccagaaccagcaagagaagaacgagcaggacctgctggccctggactgataaggatcc

SEQ ID NO: 325 - DNA, 2022 bp, synthetic construct
  source 1..2022: mol_type = other DNA
gtcgacgccaccatggatgctatgaagaggggcctgtgctgcgtgctgcttctgtgtggcgctgtgtttgtgtcccctagccaagagatccacgccagattcagaagaggcgccagagccgagaatctgtgggtcacagtgtactatggcgtgcccgtgtgggaagatgccgacacacctctgttttgtgccagcgacgccaaggcctacagcaccgagtctcacaatgtgtgggccactcacgcctgcgtgccaaccgatccatctcctcaagagatcagcctggacaacgtgaccgagaacttcaacatgtggaagaacaacatggtcgagcagatgcacgaggacatcatcagcctgtgggacgagagcctgaagccttgcgtgaagctgacccctctgtgcgtgaccctgaactgcaccaacgtgaacaacagcagcgccaccaacaactccatggtggacgatagagagggcctgaagaactgcagcttcaacatcaccaccgagctgcgggacaagaagaagcaagagcacgccctgttctaccggctggacatcgtgcccatcaacggcaacagcaactccaacagctccgtgggcgactacagactgatcaactgcaacgtgtccacatgcaagcaggcctgtcctaagatgagcttcgaccccattcctatccactactgtgcccctgccggcttcgccatcctgaagtgcagagacaagaagttcaacggcaccggcagctgcaagaatgtgtccaccgtgcagtgtacccacggcatcaagcctgtgatcagcacccagctgctgctgaatggctctgtggccgaagaggaaatcatgatccgcagcgagaactttaccaacaacgccaagaacatcatcgtccagttcaacaagaccatcgacatcatgtgcacccggcctaacaacaacacccggaagtccatcagcctcggacctggacaggccatctatgccaccggcgacatcatcggcaatatcagacaggcccactgcaacatctctggcgccgactggggcaacatgatcagaaatgtgtccgagaagctgaaagagatcttcaacaaaaccaccatcaccttcaaggcctccgctggcggcgacctggaaatcaccacacacagcttcaattgcaggggcgagttcttctactgcgacaccagcgacctgttcaactccagcagattcaacaatagcagcaacgacacgaacgacaccatcacactgccctgcaagatcaagcagatcgtgcggatgtggcagcgcgtgggccagtgtatgtatgcccctcctatcgccggcaacatcacatgcagaagcaatatcaccggcctgctgctcaccagagatggcggcggaaacaacaccaacgagacagaaaccttccggcctgccggcggagacatgagagacaattggagaagcgagctgtacaagtacaaggtggtcaagatcgagcccctgggcgtcgcacctacacggtgcaagagaagagtcgtgggccgtcgtagaaggcggagagccgttggaattggcgccgtgttcctgggctttctgggagccgctggatctacaatgggcgctgccagcatgaccctgacagtgcaggctagaaatctgctgagcggcatcgtgcagcagcagagcaatctgctcagagcccctgaggctcagcagcacctcctgaaactgacagtgtggggaatcaagcagctgcaggccagagtgctggctgtggaaagatacctgagggaccagcagctcctcggaatctggggctgttctggcaagctgatctgctgcaccaatgtgccctggaacagctcctggtccaaccggaatctgagcgagatctgggacaatatgacctggctgcagtgggacaaagagattagcaactacacccagatcatctacggactgctggaagagagccagaaccagcaagagaaaaacgagcaggacctgctggccctggactgataaggatcc

SEQ ID NO: 326 - DNA, 2022 bp, synthetic construct
  source 1..2022: mol_type = other DNA
gtcgacgccaccatggatgctatgaagaggggcctgtgctgcgtgctgcttctgtgtggcgctgtgtttgtgtcccctagccaagagatccacgccagattcagaagaggcgccagatccaacaatctgtgggtcaccgtgtactacggcgtgcccgtttgggaagatgccgacacacctctgttctgtgcctccgatgccaaggcctacagcaccgagtctcacaacgtgtgggccactcatgcctgcgtgccaaccgatccatctcctcaagagatcagcctggacaacgtgaccgagaacttcaacatgtggaagaacaacatggtcgagcagatgcacgaggacatcatcagcctgtgggacgagagcctgaagccttgcgtgaagctgacccctctgtgcgtgaccctgaactgcaccaacgtgaacaacagcagcgccaccaacaactccatggtggacgatagagagggcctgaagaactgcagcttcaacatcaccaccgagctgcgggacaagaagaagcaagagcacgccctgttctaccggctggacatcgtgcccatcaacggcaacagcaactccaacagctccgtgggcgactacagactgatcaactgcaacgtgtccaccatcaagcaggcctgtcctaagatgagcttcgaccccattcctatccactactgtgcccctgccggcttcgccatcctgaagtgcagagacaagaagttcaacggcaccggcagctgcaagaatgtgtccaccgtgcagtgtacccacggcatcaagcctgtgatcagcacccagctgctgctgaatggctctgtggccgaagaggaaatcatgatccgcagcgagaactttaccaacaacgccaagaacatcatcgtccagttcaacaagaccatcgacatcatgtgcacccggcctaacaacaacacccggaagtccatcagcctcggacctggacaggccatctatgccaccggcgacatcatcggcaatatcagacaggcccactgcaacatctctggcgccgactggggcaacatgatcagaaatgtgtccgagaagctgaaagagatcttcaacaaaaccaccatcaccttcaaggcctccgctggcggcgacctggaaatcaccacacacagcttcaattgcaggggcgagttcttctactgcgacaccagcgacctgttcaactccagcagattcaacaatagcagcaacgacacgaacgacaccatcacactgccctgcaagatcaagcagatcgtgcggatgtggcagcgcgttggccaggctatgtatgcccctcctatcgccggcaacatcacatgcagaagcaatatcaccggcctgctgctcaccagagatggcggcggaaacaacaccaacgagacagaaaccttccggcctgccggcggagacatgagagacaattggagaagcgagctgtacaagtacaaggtggtcaagatcaaccctctgggcgtcgcccctaccagatgtagaagaagagtcgtcggcagacggcggaggcggagagctattggaatgggagctgtgctgctgggctttctgggaacagccggctctacaatgggagccgcctctatcaccctgaccgtgcaagttcgacagctgctgtctggcatcgtgcagcagcagagcaacctgctgagagcccctgaagctcagcagcatctcctgcagctgacagtgtggggaatcaagcagctccaggccagaatcctggccgtcgagagatacctgaaggaccagcagctcctcggaatctggggctgttctggcaagctgatctgctgcaccaatgtgccctggaacgccagctggtccaacagaagctacaacgacatctgggagaacctgacctgggtcgagtgggagagagagatctccaactacacccagcagatctacagcctgctggaagagagccagaaccagcaagagaagaacgagcaggacctgctggccctggactgataaggatcc

SEQ ID NO: 327 - DNA, 2022 bp, synthetic construct
  source 1..2022: mol_type = other DNA
gtcgacgccaccatggatgctatgaagaggggcctgtgctgcgtgctgcttctgtgtggcgctgtgtttgtgtcccctagccaagagatccacgccagattcagaagaggcgccagatccaacaatctgtgggtcaccgtgtactacggcgtgcccgtttgggaagatgccgacacacctctgttctgtgcctccgatgccaaggcctacagcaccgagtctcacaacgtgtgggccactcatgcctgcgtgccaaccgatccatctcctcaagagatcagcctggacaacgtgaccgagaacttcaacatgtggaagaacaacatggtcgagcagatgcacgaggacatcatcagcctgtgggacgagagcctgaagccttgcgtgaagctgacccctctgtgcgtgaccctgaactgcaccaacgtgaacaacagcagcgccaccaacaactccatggtggacgatagagagggcctgaagaactgcagcttcaacatcaccaccgagctgcgggacaagaagaagcaagagcacgccctgttctaccggctggacatcgtgcccatcaacggcaacagcaactccaacagctccgtgggcgactacagactgatcaactgcaacgtgtccacctgcaagcaggcctgtcctaagatgagcttcgaccccattcctatccactactgtgcccctgccggcttcgccatcctgaagtgcagagacaagaagttcaacggcaccggcagctgcaagaatgtgtccaccgtgcagtgtacccacggcatcaagcctgtgatcagcacccagctgctgctgaatggctctgtggccgaagaggaaatcatgatccgcagcgagaactttaccaacaacgccaagaacatcatcgtccagttcaacaagaccatcgacatcatgtgcacccggcctaacaacaacacccggaagtccatcagcctcggacctggacaggccatctatgccaccggcgacatcatcggcaatatcagacaggcccactgcaacatctctggcgccgactggggcaacatgatcagaaatgtgtccgagaagctgaaagagatcttcaacaaaaccaccatcaccttcaaggcctccgctggcggcgacctggaaatcaccacacacagcttcaattgcaggggcgagttcttctactgcgacaccagcgacctgttcaactccagcagattcaacaatagcagcaacgacacgaacgacaccatcacactgccctgcaagatcaagcagatcgtgcggatgtggcagcgcgttggccagtgcatgtatgcccctcctatcgccggcaacatcacatgcagaagcaatatcaccggcctgctgctcaccagagatggcggcggaaacaacaccaacgagacagaaaccttccggcctgccggcggagacatgagagacaattggagaagcgagctgtacaagtacaaggtggtcaagatcaaccctctgggcgtcgcccctaccagatgtagaagaagagtcgtcggcagacggcggaggcggagagctattggaatgggagctgtgctgctgggctttctgggaacagccggctctacaatgggagccgcctctatcaccctgaccgtgcaagttcgacagctgctgtctggcatcgtgcagcagcagagcaacctgctgagagcccctgaagctcagcagcatctcctgcagctgacagtgtggggaatcaagcagctccaggccagaatcctggccgtcgagagatacctgaaggaccagcagctcctcggaatctggggctgttctggcaagctgatctgctgcaccaatgtgccctggaacgccagctggtccaacagaagctacaacgacatctgggagaacctgacctgggtcgagtgggagagagagatctccaactacacccagcagatctacagcctgctggaagagagccagaaccagcaagagaagaacgagcaggacctgctggccctggactgataaggatcc

SEQ ID NO: 328 - DNA, 1983 bp, synthetic construct
  source 1..1983: mol_type = other DNA
gtcgacgccaccatggatgctatgaagaggggcctgtgctgcgtgctgcttctgtgtggcgctgtgtttgtgtcccctagccaagagatccacgccagattcagaagaggcgccagatccaacaatctgtgggtcaccgtgtactacggcgtgcccgtttgggaagatgccgacacacctctgttctgtgcctccgatgccaaggcctacagcaccgagtctcacaacgtgtgggccactcatgcctgcgtgccaaccgatccatctcctcaagagatcagcctggacaacgtgaccgagaacttcaacatgtggaagaacaacatggtcgagcagatgcacgaggacatcatcagcctgtgggacgagagcctgaagccttgcgtgaagctgacccctctgtgcgtgaccctgaactgcaccaacgtgaacaacagcagcgccaccaacaactccatggtggacgatagagagggcctgaagaactgcagcttcaacatcaccaccgagctgcgggacaagaagaagcaagagcacgccctgttctaccggctggacatcgtgcccatcaacggcaacagcaactccaacagctccgtgggcgactacagactgatcaactgcaacgtgtccacatgcaagcaggcctgtcctaagatgagcttcgaccccattcctatccactactgtgcccctgccggcttcgccatcctgaagtgcagagacaagaagttcaacggcaccggcagctgcaagaatgtgtccaccgtgcagtgtacccacggcatcaagcctgtgatcagcacccagctgctgctgaatggctctgtggccgaagaggaaatcatgatccgcagcgagaactttaccaacaacgccaagaacatcatcgtccagttcaacaagaccatcgacatcatgtgcacccggcctaacaacaacacccggaagtccatcagcctcggacctggacaggccatctatgccaccggcgacatcatcggcaatatcagacaggcccactgcaacatctctggcgccgactggggcaacatgatcagaaatgtgtccgagaagctgaaagagatcttcaacaaaaccaccatcaccttcaaggcctccgctggcggcgacctggaaatcaccacacacagcttcaattgcaggggcgagttcttctactgcgacaccagcgacctgttcaactccagcagattcaacaatagcagcaacgacacgaacgacaccatcacactgccctgcaagatcaagcagatcgtgcggatgtggcagcgcgtgggccagtgtatgtatgcccctcctatcgccggcaacatcacatgcagaagcaatatcaccggcctgctgctcaccagagatggcggcggaaacaacaccaacgagacagaaaccttccggcctgccggcggagacatgagagacaattggagaagcgagctgtacaagtacaaggtggtcaagatcaaccctctgggcgtcgcccctaccagatgtagaagaagagtcgtcggcagacggcggaggcggagagctattggaatgggagctgtgctgctgggctttctgggaacagccggctctacaatgggagccgcctctatcaccctgaccgtgcaagttcgacagctgctgagcggcaaccctgactggctgcctgatatgacagtgtggggaatcaagcagctgcaggccagaatcctggccgtggaaagatacctgaaggaccagcagctcctcggaatctggggctgttctggcaagctgatctgctgcaccaatgtgccctggaacgccagctggtccaacagaagctacaacgacatctgggagaacctgacctgggtcgagtgggagagagagatctccaactacacccagcagatctacagcctgctggaagagagccagaaccagcaagagaagaacgagcaggacctgctggccctggactgataaggatcc

SEQ ID NO: 329 - DNA, 2022 bp, synthetic construct
  source 1..2022: mol_type = other DNA
gtcgacgccaccatggatgctatgaagaggggcctgtgctgcgtgctgcttctgtgtggcgctgtgtttgtgtcccctagccaagagatccacgccagattcagaagaggcgccagatccaacaatctgtgggtcaccgtgtactacggcgtgcccgtttgggaagatgcctgcacacctctgttctgtgcctccgatgccaaggcctacagcaccaagagcagaaacgtgtgggccacctgttgctgcgtgcccacagatccatctccacaagagatcagcctggacaacgtgaccgagaacttcaacatgtggaagaacaacatggtcgagcagatgcacgaggacatcatcagcctgtgggacgagagcctgaagccttgcgtgaagctgacccctctgtgcgtgaccctgaactgcaccaacgtgaacaacagcagcgccaccaacaactccatggtggacgatagagagggcctgaagaactgcagcttcaacatcaccaccgagctgcgggacaagaagaagcaagagcacgccctgttctaccggctggacatcgtgcccatcaacggcaacagcaactccaacagctccgtgggcgactacagactgatcaactgcaacgtgtccaccatcaagcaggcctgtcctaagatgagcttcgaccccattcctatccactactgtgcccctgccggcttcgccatcctgaagtgcagagacaagaagttcaacggcaccggcagctgcaagaatgtgtccaccgtgcagtgtacccacggcatcaagcctgtgatcagcacccagctgctgctgaatggctctgtggccgaagaggaaatcatgatccgcagcgagaactttaccaacaacgccaagaacatcatcgtccagttcaacaagaccatcgacatcatgtgcacccggcctaacaacaacacccggaagtccatcagcctcggacctggacaagcttggtacgccaccggcgacatcatcggcaatatcagacaggcccactgcaacatctctggcgccgactggggcaacatgatcagaaatgtgtccgagaagctgaaagagatcttcaacaaaaccaccatcaccttcaaggcctccgctggcggcgacctggaaatcaccacacacagcttcaattgcaggggcgagttcttctactgcgacaccagcgacctgttcaactccagcagattcaacaatagcagcaacgacacgaacgacaccatcacactgccctgcaagatcaagcagatcgtgcggatgtggcagcgcgttggccaggctatgtatgcccctcctatcgccggcaacatcacatgcagaagcaatatcaccggcctgctgctcaccagagatggcggcggaaacaacaccaacgagacagagacatttcggcctgccggcggagacatgagagacaattggagaagcgagctgtacaagtacaaggtggtcaagatcaaccctctgggcgtcgcccctaccagatgtagaagaagagtcgtcggcagacggcggaggcggagagctattggaatgggagctgtgctgctgggctttctgggaacagccggctctacaatgggagccgccagcatgacactgaccgtgcaagttcgacagctgctgagcggaatcgtgcagcagcagagcaactgtctgagagcccctgagtgccagcagtgtctgctgcaactgacagtgtggggaatcaagcagctgcaggccagaatcctggccgtggaaagatacctgaaggaccagcagctcctcggaatctggggctgttctggcaagctgatctgctgcaccaatgtgccctggaacgccagctggtccaacagaagctacaacgacatctgggagaacctgacctgggtcgagtgggagagagagatctccaactacacccagcagatctacagcctgctggaagagagccagaaccagcaagagaagaacgagcaggacctgctggccctggactgataaggatcc

SEQ ID NO: 330 - DNA, 2022 bp, synthetic construct
  source 1..2022: mol_type = other DNA
gtcgacgccaccatggatgctatgaagaggggcctgtgctgcgtgctgcttctgtgtggcgctgtgtttgtgtcccctagccaagagatccacgccagattcagaagaggcgccagatccaacaatctgtgggtcaccgtgtactacggcgtgcccgtttgggaagatgccgagacacctctgttctgtgcctccgatgccaaggcctacagcaccgagaagcacaacgtgtgggccactcatgcctgcgtgccaaccgatccatctcctcaagagatcagcctggacaacgtgaccgagaacttcaacatgtggaagaacaacatggtcgagcagatgcacaccgacatcatcagcctgtgggacgagagcctgaagccttgcgtgaagctgacccctctgtgcgtgaccctgaactgcaccaacgtgaacaacagcagcgccaccaacaactccatggtggacgatagagagggcctgaagaactgcagcttcaacatcaccaccgagctgcgggacaagaaaaaacaggtgcacgccctgttctaccggctggacatcgtgcccatcaacggcaacagcaactccaacagctccgtgggcgactacagactgatcaactgcaacgtgtccaccatcaagcaggcctgtcctaagatgagcttcgaccccattcctatccactactgtgcccctgccggcttcgccatcctgaagtgcagagacaagaagttcaacggcaccggcagctgcaagaatgtgtccaccgtgcagtgtacccacggcatcaagcctgtgatcagcacccagctgctgctgaatggctctgtggccgaagaggaaatcatgatccgcagcgagaactttaccaacaacgccaagaacatcatcgtccagttcaacaagaccatcgacatcatgtgcacccggcctaacaacaacaccagaaagagcatcagactcggcccaggccaggccatctatgccacaggcgatatcatcggcaacatccggcaggcccactgcaatatctctggcgccgattggggcaacatgatccggaacgtgtccgaaaagctgaaagagatcttcaacaaaaccaccatcaccttcaaggcctccgctggcggcgacctggaaatcaccacacacagcttcaattgcaggggcgagttcttctactgcgacaccagcgacctgttcaactccagcagattcaacaatagcagcaacgacacgaacgacaccatcacactgccctgcaagatcaagcagatcgtgcggatgtggcagcgcgttggccaggctatgtatgctcctcctatcgccggcaatatcacctgtcggagcaacattaccggcctgctgctcaccagagatggcggcggaaacaataccaacgagacagaaaccttccggccagccggcggagacatgagagacaattggagaagcgagctgtacaagtacaaggtggtcaagatcaaccctctgggcgtcgcccctaccagatgtagaagaagagtcgtcggcagacggcggaggcggagagctattggaatgggagctgtgctgctgggctttctgggaacagccggctctacaatgggagccgcctctatcaccctgaccgtgcaagtgcgcaatctgctgtctggcatcgtgcagcagcagagcaacctgctgagagcccctgaagctcagcagcatctcctgcagctgacagtgtggggaatcaagcagctccaggccagaatcctggccgtcgagagatacctgagggaccagcagctcctcggaatctggggctgttctggcaagctgatctgctgcaccaatgtgccctggaacgccagctggtccaacagaagctacaacgacatctgggagaacctgacctgggtcgagtgggagagagagatctccaactacacccagcagatctacagcctgctggaagagagccagaaccagcaagagaagaacgagcaggacctgctggccctggactgataaggatcc

SEQ ID NO: 331 - DNA, 1956 bp, synthetic construct
  source 1..1956: mol_type = other DNA
gtcgacgccaccatgggatctctgcaacctctggccacactgtacctgctgggaatgctggtggcttctgtgctggccgccgagaatctgtgggtcacagtgtactatggcgtgcccgtgtggaaagaggccaagaccacactgttctgtgccagcgacgccaaggcctacgatcccgaagtgcacaatgtgtgggccactcacgcctgcgtgcccaccgatcctaatcctcaagagatgttcctggaaaacgtgaccgagaacttcaacatgtggaagaacgacatggtcgagcagatgcaccaggacatcatcagcctgtggtcccagagcctgaagccttgcgtgaagctgacccctctgtgcgtgaccctgaattgcagcgacgtgatcaacagcaccggcaccatgaagaactgcagcttcagcgtgaccaccgagctgcgggacagaaagcagaagaagcacgccctgttctaccggctggacatcgtgcccctggacgagaacgacaacagcagcaaggactacagactgatcaactgcaacaccagcacatgcacccaggcctgtcctaaagtgaccttcgatcccattcctatccactactgtgcccctgccggctacgccatcctgaagtgcaacaacaagaccttcaacggcacaggcccctgcaacaacgtgtccaccgtgcagtgtacccacggcatcaagccagtggtgtctacccagctgctgctgaatggctctctggccgaggaagaagtgatcatcagaagcgagaacctgaccgacaacgtcaagaccatcatcgtgcagctgaaagaacccgtgggcatcaattgcacccggcctaacaacaacatccggcagagcatcagaatcggccctggccagacctttttcgccaccggcgatatcatcggcgacatcagagaggcccactgcaatatcagcagcaccaagtggcgggaaaccctgcagcaagttggaggcaagctggccaagtacttcaacaacaaaacgatcaagttcacccagcactctggcggcgacctggaaatcaccacacacagcttcaactgcagaggcgagttcttctactgtaataccagccagctgttcaactccacctacaacgagacaggctccatcaatggcaccggcaatagcaccatcaagctgccctgccggatcaagcagatcatcaatatgtggcaaggcgtgggccagtgtatgtacgcccctcctatcgccggcaacatcatctgcagaagcaagatcaccggcctgctgctcacaagagatggcggcatcaacaagagcgaggaaatcttcagacccggcggaggcaacatgaaggacaactggcgggacaattggcggagcgagctgtacaagtacaaggtggtcaagatcgagcccctgggcgtcgcacctacacggtgcaagagaagagtcgtgggacgtagacgaaggcggagagccgttggaatcggagccgtgttcctgggctttctgggagccgctggatctacaatgggcgctgccagcatgaccctgacagtgcaggctagaaatctgctgagcggcatcgtccagcagcagagcaatctgctcagagcccctgaggctcagcagcatctcctgaaactgaccgtgtggggaatcaagcagctgcaggccagagttctggccgtggaaagatacctgagggaccagcagctcctcggcatctggggctgttctggcaagctgatctgctgcaccaacgtgccctggaacagctcctggtccaacagaaacctgagcgagatctgggacaacatgacctggctgcagtgggacaaagagatcagcaactacacccagatcatctacggactgctggaagagagccagaaccagcaagagaaaaacgagcaggacctgctggccctggactgataaggatcc

SEQ ID NO: 332 - DNA, 1941 bp, synthetic construct
  source 1..1941: mol_type = other DNA
gtcgacgccaccatgggatctctgcaacctctggccacactgtacctgctgggaatgctggtggctagcgtgctggccaatctgtgggtcacagtgtactacggcgtgcccgtgtggaaagaggccaagaccacactgttctgtgccagcgacgccaaggcctacgatcccgaagtgcacaatgtgtgggccactcacgcctgcgtgcccaccgatcctaatcctcaagagatgttcctggaaaacgtgaccgagaacttcaacatgtggaagaacgacatggtcgagcagatgcaccaggacatcatcagcctgtggtcccagagcctgaagccttgcgtgaagctgacccctctgtgcgtgaccctgaattgcagcgacgtgatcaacagcaccggcaccatgaagaactgcagcttcagcgtgaccaccgagctgcgggacagaaagcagaagaagcacgccctgttctaccggctggacatcgtgcccctggacgagaacgacaacagcagcaaggactacagactgatcaactgcaacaccagcacatgcacccaggcctgtcctaaagtgaccttcgatcccattcctatccactactgtgcccctgccggctacgccatcctgaagtgcaacaacaagaccttcaacggcacaggcccctgcaacaacgtgtccaccgtgcagtgtacccacggcatcaagccagtggtgtctacccagctgctgctgaatggctctctggccgaggaagaagtgatcatcagaagcgagaacctgaccgacaacgtcaagaccatcatcgtgcagctgaaagaacccgtgggcatcaattgcacccggcctaacaacaacatccggcagagcatcagaatcggccctggccagacctttttcgccaccggcgatatcatcggcgacatcagagaggcccactgcaatatcagcagcaccaagtggcgggaaaccctgcagcaagttggaggcaagctggccaagtacttcaacaacaaaacgatcaagttcacccagcactctggcggcgacctggaaatcaccacacacagcttcaactgcagaggcgagttcttctactgtaataccagccagctgttcaactccacctacaacgagacaggctccatcaatggcaccggcaatagcaccatcaagctgccctgccggatcaagcagatcatcaatatgtggcaaggcgtgggccagtgtatgtacgcccctcctatcgccggcaacatcatctgcagaagcaagatcaccggcctgctgctcacaagagatggcggcatcaacaagagcgaggaaatcttcagacccggcggaggcaacatgaaggacaattggagaagcgagctgtacaagtacaaggtggtggaaatcaagcccctgggcgtcgcccctacaaagtgcaagagaagagtggtggaacggcggagaaggcggagagctgttgttggactgggagccgtgttcctgggctttcttggagccgccggatctacaatgggagccgcctctatcaccctgaccgtgcaggctagacagctgctgagcggaattgtccagcagcagaacaacctgctgagagcccctgaagcacagcaacacatgctgcagctgaccgtgtggggaatcaaacagctgcaggccagagtcctggccatcgagagatacctgaaggaccagcagctcctcggcatctggggctgttctggcaagctgatctgctgtactgccgtgccttggaacagctcctggtccaacaagtcccaagaggacatctgggacaacatgacctggatgcagtgggacagagagatcagcaactacaccaacaccatctaccgcctgctggaagatagccagacacagcaagagaaaaacgagaaggacctgctggccctggactgatgaggatcc

SEQ ID NO: 333 - DNA, 1941 bp, synthetic construct
  source 1..1941: mol_type = other DNA
gtcgacgccaccatgggatctctgcaacctctggccacactgtacctgctgggaatgctggtggctagcgtgctggccaatctgtgggtcacagtgtactacggcgtgcccgtgtggaaagaggcctgcaccacactgttttgtgccagcgacgccaaggcctacgatcccaaagtgcggaatgtgtgggccactcactgctgcgtgcccaccgatcctaatcctcaagagatgttcctggaaaacgtgaccgagaacttcaacatgtggaagaacgacatggtcgagcagatgcaccaggacatcatcagcctgtggtcccagagcctgaagccttgcgtgaagctgacccctctgtgcgtgaccctgaattgcagcgacgtgatcaacagcaccggcaccatgaagaactgcagcttcagcgtgaccaccgagctgcgggacagaaagcagaagaagcacgccctgttctaccggctggacatcgtgcccctggacgagaacgacaacagcagcaaggactacagactgatcaactgcaacaccagcacatgcacccaggcctgtcctaaagtgaccttcgatcccattcctatccactactgtgcccctgccggctacgccatcctgaagtgcaacaacaagaccttcaacggcacaggcccctgcaacaacgtgtccaccgtgcagtgtacccacggcatcaagccagtggtgtctacccagctgctgctgaatggctctctggccgaggaagaagtgatcatcagaagcgagaacctgaccgacaacgtcaagaccatcatcgtgcagctgaaagaacccgtgggcatcaattgcacccggcctaacaacaacatccggcagagcatcagaatcggccctggccagacttggtttgccaccggcgatatcatcggcgacatcagagaggcccactgcaatatcagcagcaccaagtggcgggaaaccctgcagcaagttggaggcaagctggccaagtacttcaacaacaaaacgatcaagttcacccagcactctggcggcgacctggaaatcaccacacacagcttcaactgcagaggcgagttcttctactgtaataccagccagctgttcaactccacctacaacgagacaggctccatcaatggcaccggcaatagcaccatcaagctgccctgccggatcaagcagatcatcaatatgtggcaaggcgtgggccagtgtatgtacgcccctcctatcgccggcaacatcatctgcagaagcaagatcaccggcctgctgctcacaagagatggcggcatcaacaagagcgaggaaatcttcagacccggcggaggcaacatgaaggacaattggagaagcgagctgtacaagtacaaggtggtggaaatcaagcccctgggcgtcgcccctacaaagtgcaagagaagagtggtggaacggcggagaaggcggagagctgttgttggactgggagccgtgttcctgggctttcttggagccgccggatctacaatgggagccgcctctatgaccctgaccgtgcaggctagacagctgctgagcggaattgtccagcagcagaacaactgcctgagagcccctgagtgccagcagtgtatgctgcagctgacagtgtggggaatcaagcagctgcaggccagagttctggccatcgagagatacctgaaggaccagcagctcctcggcatctggggctgttctggcaagctgatctgctgtactgccgtgccttggaacagctcctggtccaacaagtcccaagaggacatctgggacaacatgacctggatgcagtgggacagagagatcagcaactacaccaacaccatctaccgcctgctggaagatagccagacacagcaagagaaaaacgagaaggacctgctggccctggactgatgaggatcc

SEQ ID NO: 334 - DNA, 1902 bp, synthetic construct
  source 1..1902: mol_type = other DNA
gtcgacgccaccatgggatctctgcaacctctggccacactgtacctgctgggaatgctggtggctagcgtgctggccaatctgtgggtcacagtgtactacggcgtgcccgtgtggaaagaggccaagaccacactgttctgtgccagcgacgccaaggcctacgatcccgaagtgcacaatgtgtgggccactcacgcctgcgtgcccaccgatcctaatcctcaagagatgttcctggaaaacgtgaccgagaacttcaacatgtggaagaacgacatggtcgagcagatgcaccaggacatcatcagcctgtggtcccagagcctgaagccttgcgtgaagctgacccctctgtgcgtgaccctgaattgcagcgacgtgatcaacagcaccggcaccatgaagaactgcagcttcagcgtgaccaccgagctgcgggacagaaagcagaagaagcacgccctgttctaccggctggacatcgtgcccctggacgagaacgacaacagcagcaaggactacagactgatcaactgcaacaccagcacatgcacccaggcctgtcctaaagtgaccttcgatcccattcctatccactactgtgcccctgccggctacgccatcctgaagtgcaacaacaagaccttcaacggcacaggcccctgcaacaacgtgtccaccgtgcagtgtacccacggcatcaagccagtggtgtctacccagctgctgctgaatggctctctggccgaggaagaagtgatcatcagaagcgagaacctgaccgacaacgtcaagaccatcatcgtgcagctgaaagaacccgtgggcatcaattgcacccggcctaacaacaacatccggcagagcatcagaatcggccctggccagacctttttcgccaccggcgatatcatcggcgacatcagagaggcccactgcaatatcagcagcaccaagtggcgggaaaccctgcagcaagttggaggcaagctggccaagtacttcaacaacaaaacgatcaagttcacccagcactctggcggcgacctggaaatcaccacacacagcttcaactgcagaggcgagttcttctactgtaataccagccagctgttcaactccacctacaacgagacaggctccatcaatggcaccggcaatagcaccatcaagctgccctgccggatcaagcagatcatcaatatgtggcaaggcgtgggccagtgtatgtacgcccctcctatcgccggcaacatcatctgcagaagcaagatcaccggcctgctgctcacaagagatggcggcatcaacaagagcgaggaaatcttcagacccggcggaggcaacatgaaggacaattggagaagcgagctgtacaagtacaaggtggtggaaatcaagcccctgggcgtcgcccctacaaagtgcaagagaagagtggtggaacggcggagaaggcggagagctgttgttggactgggagccgtgttcctgggctttcttggagccgccggatctacaatgggagccgcctctatcaccctgaccgtgcaggctagacagctgctgagcggcaatcctgactggctgcctgatatgaccgtgtggggaatcaagcagctgcaggccagagttctggccatcgagagatacctgaaggaccagcagctcctcggcatctggggctgttctggcaagctgatctgctgtactgccgtgccttggaacagctcctggtccaacaagtcccaagaggacatctgggacaacatgacctggatgcagtgggacagagagatcagcaactacaccaacaccatctaccgcctgctggaagatagccagacacagcaagagaaaaacgagaaggacctgctggccctggactgatgaggatcc

SEQ ID NO: 335 - DNA, 1941 bp, synthetic construct
  source 1..1941: mol_type = other DNA
gtcgacgccaccatgggatctctgcaacctctggccacactgtacctgctgggaatgctggtggctagcgtgctggccaatctgtgggtcacagtgtactacggcgtgcccgtgtggaaggatgccgagacaacactgttctgtgccagcgacgccaaggcctacgatcccgagaaacacaacgtgtgggccactcacgcctgcgtgccaaccgatcctaatcctcaagagatgttcctggaaaacgtgaccgagaacttcaacatgtggaagaacgacatggtcgagcagatgcacaccgacatcatcagcctgtggtcccagagcctgaagccttgcgtgaagctgacccctctgtgcgtgaccctgaattgcagcgacgtgatcaacagcaccggcaccatgaagaactgcagcttcagcgtgaccaccgagctgcgggacagaaagcagaaagtgcacgccctgttctaccggctggacatcgttcctctggacgagaacgacaacagcagcaaggactacagactgatcaactgcaacaccagcacatgcacccaggcctgtcctaaagtgaccttcgatcccattcctatccactactgtgcccctgccggctacgccatcctgaagtgcaacaacaagaccttcaacggcacaggcccctgcaacaacgtgtccaccgtgcagtgtacccacggcatcaagccagtggtgtctacccagctgctgctgaatggctctctggccgaggaagaagtgatcatcagaagcgagaacctgaccgacaacgtcaagaccatcatcgtgcagctgaaagaacccgtgggcatcaattgcacccggcctaacaacaacatccggcagagcatcagaatcggccctggccagacctttttcgccaccggcgatatcatcggcgacatcagagaggcccactgcaatatcagcagcaccaagtggcgggaaaccctgcagcaagttggaggcaagctggccaagtacttcaacaacaaaacgatcaagttcacccagcactctggcggcgacctggaaatcaccacacacagcttcaactgcagaggcgagttcttctactgtaataccagccagctgttcaactccacctacaacgagacaggctccatcaatggcaccggcaatagcaccatcaagctgccctgccggatcaagcagatcatcaatatgtggcagcgcgtgggccagtgtatgtacgcccctccaatcgccggcaacatcatctgcagaagcaagatcaccggcctgctgctcacaagagatggcggcatcaacaagagcgaggaaatcttcagacccggcggaggcaacatgaaggacaattggagaagcgagctgtacaagtacaaggtggtggaaatcaagcccctgggcgtcgcccctacacggtgcaaaagaagagtggtcgagcggcggagaaggcggagagctgttgttggactgggagccgtgttcctgggctttcttggagccgccggatctacaatgggagccgcctctatcaccctgaccgtgcaggctagaaatctgctgagcggcatcgtccagcagcagagcaatctgctcagagcccctgaggcacagcaacacatgctgcagctgacagtgtggggaatcaagcagctgcaggccagagttctggccatcgagagatacctgagggaccagcagctcctcggcatctggggctgttctggcaagctgatctgctgtactgccgtgccttggaacagctcctggtccaacaagtcccaagaggacatctgggacaacatgacctggatgcagtgggacagagagatcagcaactacaccaacaccatctaccgcctgctggaagatagccagacacagcaagagaagaacgagaaggacctgctggccctggactgatgaggatcc

SEQ ID NO: 336 - DNA, 1995 bp, synthetic construct
  source 1..1995: mol_type = other DNA
gtcgacgccaccatggatgctatgaagaggggcctgtgctgcgtgctgcttctgtgtggcgctgtgtttgtgtcccctagccaagagatccacgccagattcagaagaggcgccagagccgagaatctgtgggtcacagtgtactatggcgtgcccgtgtggaaagaggccaagaccacactgttctgtgccagcgacgccaaggcctacgatcccgaagtgcacaatgtgtgggccactcacgcctgcgtgcccaccgatcctaatcctcaagagatgttcctggaaaacgtgaccgagaacttcaacatgtggaagaacgacatggtcgagcagatgcaccaggacatcatcagcctgtggtcccagagcctgaagccttgcgtgaagctgacccctctgtgcgtgaccctgaattgcagcgacgtgatcaacagcaccggcaccatgaagaactgcagcttcagcgtgaccaccgagctgcgggacagaaagcagaagaagcacgccctgttctaccggctggacatcgtgcccctggacgagaacgacaacagcagcaaggactacagactgatcaactgcaacaccagcacatgcacccaggcctgtcctaaagtgaccttcgatcccattcctatccactactgtgcccctgccggctacgccatcctgaagtgcaacaacaagaccttcaacggcacaggcccctgcaacaacgtgtccaccgtgcagtgtacccacggcatcaagccagtggtgtctacccagctgctgctgaatggctctctggccgaggaagaagtgatcatcagaagcgagaacctgaccgacaacgtcaagaccatcatcgtgcagctgaaagaacccgtgggcatcaattgcacccggcctaacaacaacatccggcagagcatcagaatcggccctggccagacctttttcgccaccggcgatatcatcggcgacatcagagaggcccactgcaatatcagcagcaccaagtggcgggaaaccctgcagcaagttggaggcaagctggccaagtacttcaacaacaaaacgatcaagttcacccagcactctggcggcgacctggaaatcaccacacacagcttcaactgcagaggcgagttcttctactgtaataccagccagctgttcaactccacctacaacgagacaggctccatcaatggcaccggcaatagcaccatcaagctgccctgccggatcaagcagatcatcaatatgtggcaaggcgtgggccagtgtatgtacgcccctcctatcgccggcaacatcatctgcagaagcaagatcaccggcctgctgctcacaagagatggcggcatcaacaagagcgaggaaatcttcagacccggcggaggcaacatgaaggacaactggcgggacaattggcggagcgagctgtacaagtacaaggtggtcaagatcgagcccctgggcgtcgcacctacacggtgcaagagaagagtcgtgggacgtagacgaaggcggagagccgttggaatcggagccgtgttcctgggctttctgggagccgctggatctacaatgggcgctgccagcatgaccctgacagtgcaggctagaaatctgctgagcggcatcgtccagcagcagagcaatctgctcagagcccctgaggctcagcagcatctcctgaaactgaccgtgtggggaatcaagcagctgcaggccagagttctggccgtggaaagatacctgagggaccagcagctcctcggcatctggggctgttctggcaagctgatctgctgcaccaacgtgccctggaacagctcctggtccaacagaaacctgagcgagatctgggacaacatgacctggctgcagtgggacaaagagatcagcaactacacccagatcatctacggactgctggaagagagccagaaccagcaagagaaaaacgagcaggacctgctggccctggactgataaggatcc

SEQ ID NO: 337 - DNA, 1980 bp, synthetic construct
  source 1..1980: mol_type = other DNA
gtcgacgccaccatggatgctatgaagaggggcctgtgctgcgtgctgcttctgtgtggcgctgtgtttgtgtcccctagccaagagatccacgccagattcagaagaggcgccagaaatctgtgggtcacagtgtactacggcgtgcccgtgtggaaagaggccaagaccacactgttctgtgccagcgacgccaaggcctacgatcccgaagtgcacaatgtgtgggccactcacgcctgcgtgcccaccgatcctaatcctcaagagatgttcctggaaaacgtgaccgagaacttcaacatgtggaagaacgacatggtcgagcagatgcaccaggacatcatcagcctgtggtcccagagcctgaagccttgcgtgaagctgacccctctgtgcgtgaccctgaattgcagcgacgtgatcaacagcaccggcaccatgaagaactgcagcttcagcgtgaccaccgagctgcgggacagaaagcagaagaagcacgccctgttctaccggctggacatcgtgcccctggacgagaacgacaacagcagcaaggactacagactgatcaactgcaacaccagcacatgcacccaggcctgtcctaaagtgaccttcgatcccattcctatccactactgtgcccctgccggctacgccatcctgaagtgcaacaacaagaccttcaacggcacaggcccctgcaacaacgtgtccaccgtgcagtgtacccacggcatcaagccagtggtgtctacccagctgctgctgaatggctctctggccgaggaagaagtgatcatcagaagcgagaacctgaccgacaacgtcaagaccatcatcgtgcagctgaaagaacccgtgggcatcaattgcacccggcctaacaacaacatccggcagagcatcagaatcggccctggccagacctttttcgccaccggcgatatcatcggcgacatcagagaggcccactgcaatatcagcagcaccaagtggcgggaaaccctgcagcaagttggaggcaagctggccaagtacttcaacaacaaaacgatcaagttcacccagcactctggcggcgacctggaaatcaccacacacagcttcaactgcagaggcgagttcttctactgtaataccagccagctgttcaactccacctacaacgagacaggctccatcaatggcaccggcaatagcaccatcaagctgccctgccggatcaagcagatcatcaatatgtggcaaggcgtgggccagtgtatgtacgcccctcctatcgccggcaacatcatctgcagaagcaagatcaccggcctgctgctcacaagagatggcggcatcaacaagagcgaggaaatcttcagacccggcggaggcaacatgaaggacaattggagaagcgagctgtacaagtacaaggtggtggaaatcaagcccctgggcgtcgcccctacaaagtgcaagagaagagtggtggaacggcggagaaggcggagagctgttgttggactgggagccgtgttcctgggctttcttggagccgccggatctacaatgggagccgcctctatcaccctgaccgtgcaggctagacagctgctgagcggaattgtccagcagcagaacaacctgctgagagcccctgaagcacagcaacacatgctgcagctgaccgtgtggggaatcaaacagctgcaggccagagtcctggccatcgagagatacctgaaggaccagcagctcctcggcatctggggctgttctggcaagctgatctgctgtactgccgtgccttggaacagctcctggtccaacaagtcccaagaggacatctgggacaacatgacctggatgcagtgggacagagagatcagcaactacaccaacaccatctaccgcctgctggaagatagccagacacagcaagagaaaaacgagaaggacctgctggccctggactgatgaggatcc

SEQ ID NO: 338 - DNA, 1980 bp, synthetic construct
  source 1..1980: mol_type = other DNA
gtcgacgccaccatggatgctatgaagaggggcctgtgctgcgtgctgcttctgtgtggcgctgtgtttgtgtcccctagccaagagatccacgccagattcagaagaggcgccagaaatctgtgggtcacagtgtactacggcgtgcccgtgtggaaagaggcctgcaccacactgttttgtgccagcgacgccaaggcctacgatcccaaagtgcggaatgtgtgggccactcactgctgcgtgcccaccgatcctaatcctcaagagatgttcctggaaaacgtgaccgagaacttcaacatgtggaagaacgacatggtcgagcagatgcaccaggacatcatcagcctgtggtcccagagcctgaagccttgcgtgaagctgacccctctgtgcgtgaccctgaattgcagcgacgtgatcaacagcaccggcaccatgaagaactgcagcttcagcgtgaccaccgagctgcgggacagaaagcagaagaagcacgccctgttctaccggctggacatcgtgcccctggacgagaacgacaacagcagcaaggactacagactgatcaactgcaacaccagcacatgcacccaggcctgtcctaaagtgaccttcgatcccattcctatccactactgtgcccctgccggctacgccatcctgaagtgcaacaacaagaccttcaacggcacaggcccctgcaacaacgtgtccaccgtgcagtgtacccacggcatcaagccagtggtgtctacccagctgctgctgaatggctctctggccgaggaagaagtgatcatcagaagcgagaacctgaccgacaacgtcaagaccatcatcgtgcagctgaaagaacccgtgggcatcaattgcacccggcctaacaacaacatccggcagagcatcagaatcggccctggccagacttggtttgccaccggcgatatcatcggcgacatcagagaggcccactgcaatatcagcagcaccaagtggcgggaaaccctgcagcaagttggaggcaagctggccaagtacttcaacaacaaaacgatcaagttcacccagcactctggcggcgacctggaaatcaccacacacagcttcaactgcagaggcgagttcttctactgtaataccagccagctgttcaactccacctacaacgagacaggctccatcaatggcaccggcaatagcaccatcaagctgccctgccggatcaagcagatcatcaatatgtggcaaggcgtgggccagtgtatgtacgcccctcctatcgccggcaacatcatctgcagaagcaagatcaccggcctgctgctcacaagagatggcggcatcaacaagagcgaggaaatcttcagacccggcggaggcaacatgaaggacaattggagaagcgagctgtacaagtacaaggtggtggaaatcaagcccctgggcgtcgcccctacaaagtgcaagagaagagtggtggaacggcggagaaggcggagagctgttgttggactgggagccgtgttcctgggctttcttggagccgccggatctacaatgggagccgcctctatgaccctgaccgtgcaggctagacagctgctgagcggaattgtccagcagcagaacaactgcctgagagcccctgagtgccagcagtgtatgctgcagctgacagtgtggggaatcaagcagctgcaggccagagttctggccatcgagagatacctgaaggaccagcagctcctcggcatctggggctgttctggcaagctgatctgctgtactgccgtgccttggaacagctcctggtccaacaagtcccaagaggacatctgggacaacatgacctggatgcagtgggacagagagatcagcaactacaccaacaccatctaccgcctgctggaagatagccagacacagcaagagaaaaacgagaaggacctgctggccctggactgatgaggatcc

SEQ ID NO: 339 - DNA, 1941 bp, synthetic construct
  source 1..1941: mol_type = other DNA
gtcgacgccaccatggatgctatgaagaggggcctgtgctgcgtgctgcttctgtgtggcgctgtgtttgtgtcccctagccaagagatccacgccagattcagaagaggcgccagaaatctgtgggtcacagtgtactacggcgtgcccgtgtggaaagaggccaagaccacactgttctgtgccagcgacgccaaggcctacgatcccgaagtgcacaatgtgtgggccactcacgcctgcgtgcccaccgatcctaatcctcaagagatgttcctggaaaacgtgaccgagaacttcaacatgtggaagaacgacatggtcgagcagatgcaccaggacatcatcagcctgtggtcccagagcctgaagccttgcgtgaagctgacccctctgtgcgtgaccctgaattgcagcgacgtgatcaacagcaccggcaccatgaagaactgcagcttcagcgtgaccaccgagctgcgggacagaaagcagaagaagcacgccctgttctaccggctggacatcgtgcccctggacgagaacgacaacagcagcaaggactacagactgatcaactgcaacaccagcacatgcacccaggcctgtcctaaagtgaccttcgatcccattcctatccactactgtgcccctgccggctacgccatcctgaagtgcaacaacaagaccttcaacggcacaggcccctgcaacaacgtgtccaccgtgcagtgtacccacggcatcaagccagtggtgtctacccagctgctgctgaatggctctctggccgaggaagaagtgatcatcagaagcgagaacctgaccgacaacgtcaagaccatcatcgtgcagctgaaagaacccgtgggcatcaattgcacccggcctaacaacaacatccggcagagcatcagaatcggccctggccagacctttttcgccaccggcgatatcatcggcgacatcagagaggcccactgcaatatcagcagcaccaagtggcgggaaaccctgcagcaagttggaggcaagctggccaagtacttcaacaacaaaacgatcaagttcacccagcactctggcggcgacctggaaatcaccacacacagcttcaactgcagaggcgagttcttctactgtaataccagccagctgttcaactccacctacaacgagacaggctccatcaatggcaccggcaatagcaccatcaagctgccctgccggatcaagcagatcatcaatatgtggcaaggcgtgggccagtgtatgtacgcccctcctatcgccggcaacatcatctgcagaagcaagatcaccggcctgctgctcacaagagatggcggcatcaacaagagcgaggaaatcttcagacccggcggaggcaacatgaaggacaattggagaagcgagctgtacaagtacaaggtggtggaaatcaagcccctgggcgtcgcccctacaaagtgcaagagaagagtggtggaacggcggagaaggcggagagctgttgttggactgggagccgtgttcctgggctttcttggagccgccggatctacaatgggagccgcctctatcaccctgaccgtgcaggctagacagctgctgagcggcaatcctgactggctgcctgatatgaccgtgtggggaatcaagcagctgcaggccagagttctggccatcgagagatacctgaaggaccagcagctcctcggcatctggggctgttctggcaagctgatctgctgtactgccgtgccttggaacagctcctggtccaacaagtcccaagaggacatctgggacaacatgacctggatgcagtgggacagagagatcagcaactacaccaacaccatctaccgcctgctggaagatagccagacacagcaagagaaaaacgagaaggacctgctggccctggactgatgaggatcc

SEQ ID NO: 340 - DNA, 1980 bp, synthetic construct
  source 1..1980: mol_type = other DNA
gtcgacgccaccatggatgctatgaagaggggcctgtgctgcgtgctgcttctgtgtggcgctgtgtttgtgtcccctagccaagagatccacgccagattcagaagaggcgccagaaatctgtgggtcacagtgtactacggcgtgcccgtgtggaaggatgccgagacaacactgttctgtgccagcgacgccaaggcctacgatcccgagaaacacaacgtgtgggccactcacgcctgcgtgccaaccgatcctaatcctcaagagatgttcctggaaaacgtgaccgagaacttcaacatgtggaagaacgacatggtcgagcagatgcacaccgacatcatcagcctgtggtcccagagcctgaagccttgcgtgaagctgacccctctgtgcgtgaccctgaattgcagcgacgtgatcaacagcaccggcaccatgaagaactgcagcttcagcgtgaccaccgagctgcgggacagaaagcagaaagtgcacgccctgttctaccggctggacatcgttcctctggacgagaacgacaacagcagcaaggactacagactgatcaactgcaacaccagcacatgcacccaggcctgtcctaaagtgaccttcgatcccattcctatccactactgtgcccctgccggctacgccatcctgaagtgcaacaacaagaccttcaacggcacaggcccctgcaacaacgtgtccaccgtgcagtgtacccacggcatcaagccagtggtgtctacccagctgctgctgaatggctctctggccgaggaagaagtgatcatcagaagcgagaacctgaccgacaacgtcaagaccatcatcgtgcagctgaaagaacccgtgggcatcaattgcacccggcctaacaacaacatccggcagagcatcagaatcggccctggccagacctttttcgccaccggcgatatcatcggcgacatcagagaggcccactgcaatatcagcagcaccaagtggcgggaaaccctgcagcaagttggaggcaagctggccaagtacttcaacaacaaaacgatcaagttcacccagcactctggcggcgacctggaaatcaccacacacagcttcaactgcagaggcgagttcttctactgtaataccagccagctgttcaactccacctacaacgagacaggctccatcaatggcaccggcaatagcaccatcaagctgccctgccggatcaagcagatcatcaatatgtggcagcgcgtgggccagtgtatgtacgcccctccaatcgccggcaacatcatctgcagaagcaagatcaccggcctgctgctcacaagagatggcggcatcaacaagagcgaggaaatcttcagacccggcggaggcaacatgaaggacaattggagaagcgagctgtacaagtacaaggtggtggaaatcaagcccctgggcgtcgcccctacacggtgcaaaagaagagtggtcgagcggcggagaaggcggagagctgttgttggactgggagccgtgttcctgggctttcttggagccgccggatctacaatgggagccgcctctatcaccctgaccgtgcaggctagaaatctgctgagcggcatcgtccagcagcagagcaatctgctcagagcccctgaggcacagcaacacatgctgcagctgacagtgtggggaatcaagcagctgcaggccagagttctggccatcgagagatacctgagggaccagcagctcctcggcatctggggctgttctggcaagctgatctgctgtactgccgtgccttggaacagctcctggtccaacaagtcccaagaggacatctgggacaacatgacctggatgcagtgggacagagagatcagcaactacaccaacaccatctaccgcctgctggaagatagccagacacagcaagagaagaacgagaaggacctgctggccctggactgatgaggatcc

SEQ ID NO: 341 - DNA, 1971 bp, synthetic construct
  source 1..1971: mol_type = other DNA
gtcgacgccaccatgcctatgggatctctgcagcctctggccacactgtacctgctgggaatgctggtggctagcgtgctggccaagggaaagctgtgggtcacagtgtactacggcgtgcccgtgtggaaagaggccaagaccacactgttctgcgcctccgatgccagagcctacgagaaagaggtgcacaacgtctgggccacacacgcctgtgtgcctaccgatccatctcctcaagagctgttcctgaagaacgtgaccgagaacttcaacatgtggaagaacgacatggtggaccagatgcacgaggacatcatcagcctgtgggaccagagcctgaagccttgcgtgaagctgacccctctgtgcgtgaccctgatctgcagcaatgccaccgtgaagaaccggaccgtggaagagatgaagaactgcagcttcaacaccaccaccgagatccgggacaaagagaagaaagagtacgccctgttctacaagcccgacgtggtgcccctggacgagacaaacaataccagcgagtaccggctgatcaactgcaacaccagcgcctgcactcaggcctgtcctaaagtgaccttcgagcccattcctatccactactgtgcccctgccggctacgccatcctgaagtgcaacaacgagacattcaacggcacaggcccctgcagcaacgtgtccacagtgcagtgtacccacggcatcagacccgtggtgtctacacagctgctgctgaatggaagcctggccgagaaagaaatcgtgatcagaagcgagaacctgaccaacaacgccaagatcatcatcgtgcacctgaacacccctgtggaaatcgtgtgcacccggcctaacaacaacaccagaaagagcgtgcggatcggccctggccagaccttttatgccaccggcgatatcatcggcgacatcagacaggcccactgtaacatcagcgagaagcagtggaacgacaccctgcagaaagtgggcaaagagctgaagaagcacttccccaacaagaccattaagtacgcccagagcgctggcggcgacatggaaatcaccacacacagcttcaattgtggcggcgagttcttctactgcaataccgccaagctgttcaacggaacctacaacggcaccgacatcagcaccaacagcagcgccgacagcaacagcaccatcactctgcagtgccggatcaagcagatcatcaatatgtggcaaggcgtcggccggtgtatgtacgcccctcctatcgccggcaacatcacatgcaagagccacatcacaggcctgctgctcacaagagatggcggcacaaacagctccggcaaagaggaaatcttccggcctgccggcggagacatgcgggataattggagaagcgagctgtacaagtacaaggtggtggaaatccagccactgggaatcgccccaacaggctgcaagagaagagtggtcgagcggagaagaaggcggagagctgctggactgggtgccctgtttctgggctttcttggagccgccggaagcacaatgggagccgcctctattaccctgaccgtgcaggctagacagctgctctctggaatcgtgcagcagcagagcaacctgctgagagcccctgaagctcagcagcacatgctgcagctgacagtgtggggcatcaagcagctgcaggcaagagtgctggccctggaaagatacctgaaggatcagcagctcctcggcatgtggggctgttctggcaagctgatctgctgcaccaacgtgccctggaacacctcttggagcaacaagagcgagacagacatctgggacaacatgacctggatgcagtgggagagagagatcagcaactacaccgagacaatctacaaactgctcgaggacagccagaaccagcaagagagaaacgagcaggacctgctggctctggactgatgaggatcc

SEQ ID NO: 342 - DNA, 2004 bp, synthetic construct
  source 1..2004: mol_type = other DNA
gtcgacgccaccatggatgctatgaagaggggcctgtgctgcgtgctgcttctgtgtggcgctgtgtttgtgtcccctagccaagagatccacgccagattcagaagaggcgccagaaagggaaagctgtgggtcacagtgtactacggcgtgcccgtgtggaaagaggccaagaccacactgttctgcgcctccgatgccagagcctacgagaaagaggtgcacaacgtctgggccacacacgcctgtgtgcctaccgatccatctcctcaagagctgttcctgaagaacgtgaccgagaacttcaacatgtggaagaacgacatggtggaccagatgcacgaggacatcatcagcctgtgggaccagagcctgaagccttgcgtgaagctgacccctctgtgcgtgaccctgatctgcagcaatgccaccgtgaagaaccggaccgtggaagagatgaagaactgcagcttcaacaccaccaccgagatccgggacaaagagaagaaagagtacgccctgttctacaagcccgacgtggtgcccctggacgagacaaacaataccagcgagtaccggctgatcaactgcaacaccagcgcctgcactcaggcctgtcctaaagtgaccttcgagcccattcctatccactactgtgcccctgccggctacgccatcctgaagtgcaacaacgagacattcaacggcacaggcccctgcagcaacgtgtccacagtgcagtgtacccacggcatcagacccgtggtgtctacacagctgctgctgaatggaagcctggccgagaaagaaatcgtgatcagaagcgagaacctgaccaacaacgccaagatcatcatcgtgcacctgaacacccctgtggaaatcgtgtgcacccggcctaacaacaacaccagaaagagcgtgcggatcggccctggccagaccttttatgccaccggcgatatcatcggcgacatcagacaggcccactgtaacatcagcgagaagcagtggaacgacaccctgcagaaagtgggcaaagagctgaagaagcacttccccaacaagaccattaagtacgcccagagcgctggcggcgacatggaaatcaccacacacagcttcaattgtggcggcgagttcttctactgcaataccgccaagctgttcaacggaacctacaacggcaccgacatcagcaccaacagcagcgccgacagcaacagcaccatcactctgcagtgccggatcaagcagatcatcaatatgtggcaaggcgtcggccggtgtatgtacgcccctcctatcgccggcaacatcacatgcaagagccacatcacaggcctgctgctcacaagagatggcggcacaaacagctccggcaaagaggaaatcttccggcctgccggcggagacatgcgggataattggagaagcgagctgtacaagtacaaggtggtggaaatccagccactgggaatcgccccaacaggctgcaagagaagagtggtcgagcggagaagaaggcggagagctgctggactgggtgccctgtttctgggctttcttggagccgccggaagcacaatgggagccgcctctattaccctgaccgtgcaggctagacagctgctctctggaatcgtgcagcagcagagcaacctgctgagagcccctgaagctcagcagcacatgctgcagctgacagtgtggggcatcaagcagctgcaggcaagagtgctggccctggaaagatacctgaaggatcagcagctcctcggcatgtggggctgttctggcaagctgatctgctgcaccaacgtgccctggaacacctcttggagcaacaagagcgagacagacatctgggacaacatgacctggatgcagtgggagagagagatcagcaactacaccgagacaatctacaaactgctcgaggacagccagaaccagcaagagagaaacgagcaggacctgctggctctggactgatgaggatcc

SEQ ID NO: 343 - DNA, 1971 bp, synthetic construct
  source 1..1971: mol_type = other DNA
gtcgacgccaccatgcctatgggatctctgcagcctctggccacactgtacctgctgggaatgctggtggcttctgtgctggccgccgagaatctgtgggtcacagtgtactatggcgtgcccgtgtggaaagaggccaagaccacactgttctgcgcctccgatgccagagcctacgagaaagaggtgcacaacgtctgggccacacacgcctgtgtgcctaccgatccatctcctcaagagctgttcctgaagaacgtgaccgagaacttcaacatgtggaagaacgacatggtggaccagatgcacgaggacatcatcagcctgtgggaccagagcctgaagccttgcgtgaagctgacccctctgtgcgtgaccctgatctgcagcaatgccaccgtgaagaaccggaccgtggaagagatgaagaactgcagcttcaacaccaccaccgagatccgggacaaagagaagaaagagtacgccctgttctacaagcccgacgtggtgcccctggacgagacaaacaataccagcgagtaccggctgatcaactgcaacaccagcgcctgcactcaggcctgtcctaaagtgaccttcgagcccattcctatccactactgtgcccctgccggctacgccatcctgaagtgcaacaacgagacattcaacggcacaggcccctgcagcaacgtgtccacagtgcagtgtacccacggcatcagacccgtggtgtctacacagctgctgctgaatggaagcctggccgagaaagaaatcgtgatcagaagcgagaacctgaccaacaacgccaagatcatcatcgtgcacctgaacacccctgtggaaatcgtgtgcacccggcctaacaacaacaccagaaagagcgtgcggatcggccctggccagaccttttatgccaccggcgatatcatcggcgacatcagacaggcccactgtaacatcagcgagaagcagtggaacgacaccctgcagaaagtgggcaaagagctgaagaagcacttccccaacaagaccattaagtacgcccagagcgctggcggcgacatggaaatcaccacacacagcttcaattgtggcggcgagttcttctactgcaataccgccaagctgttcaacggaacctacaacggcaccgacatcagcaccaacagcagcgccgacagcaacagcaccatcactctgcagtgccggatcaagcagatcatcaatatgtggcaaggcgtcggccggtgtatgtacgcccctcctatcgccggcaacatcacatgcaagagccacatcacaggcctgctgctcacaagagatggcggcacaaacagctccggcaaagaggaaatcttccggcctgccggcggagacatgcgggataattggagaagcgagctgtacaagtacaaggtggtcaagatcgagcccctgggcgtcgcacctacacggtgcaagagaagagtcgtgggccgtcgtagaaggcggagagccgttggaattggcgccgtgttcctgggctttctgggagccgctggatctacaatgggcgctgccagcatgaccctgacagtgcaggctagaaatctgctgagcggcatcgtgcagcagcagagcaatctgctcagagcccctgaggctcagcagcacctcctgaaactgacagtgtggggcatcaagcagctgcaggcaagagtgctggcagtggaaagatacctgcgggaccagcagctcctcggaatctggggatgtagcggcaagctgatctgctgcaccaacgtgccctggaacagcagctggtccaacagaaacctgagcgagatctgggataacatgacctggctgcagtgggacaaagaaatcagcaactacacccagatcatctacggcctgctggaagagagccagaaccagcaagagaaaaacgagcaggacctgctggccctggactgataaggatcc

SEQ ID NO: 344 - DNA, 2013 bp, synthetic construct
  source 1..2013: mol_type = other DNA
gtcgacgccaccatgcctatgggatctctgcagcctctggccacactgtacctgctgggaatgctggtggcttctgtgctggccgagggcaatctgtgggtcacagtgtactatggcgtgcccgtgtggaaagaggccaagaccacactgttctgtgccagcgacgccaaggcctacaagaaagaggtgcacaacgtctgggccacacacgcctgtgtgcctaccgatccatctcctcaagagctgttcctgaagaacgtgaccgagaacttcaacatgtggaagaacgacatggtggaccagatgcacgaggacatcatcagcctgtgggaccagagcctgaagccttgcgtgaagctgacccctctgtgcgtgaccctgatctgcagcaacgccatcgtgaagaacagcaccaccgagaagatgagcaatgtgaccgtgaacaacatcaccattgaggaaatgaagaactgcagcttcaacaccaccacagagatccgggacaagattaagaaagagcgggccctgttctacagacccgacatcgtgcccctgaacgacgagacaaacaacaccagcaagtaccggctgatcaactgcaacacctccgcctgcactcaggcctgtcctaaagtgaccttcgagcccattcctatccactactgtgcccctgccggctatgccatcctgaagtgcaacgacgaaaccttcaacggcacaggcccctgcagcaatgtgtccaccgtgcagtgtacccacggcatcagaccagtggtgtctacccagctgctgctgaatggaagcctggccgagaaagaaatcgtgatcagaagcgagaacctgaccaacaacgccaagatcatcattgtgcatctgcacgcccctgtggaaatcgtgtgcacccggccttacaacaacacccggaagtctgtgcggatcggccctggccagacattctatgccaccggcgatatcatcggcgaccctagacaggcccactgtaacatcagcaaagagatctggaacaagaccctgcaagaagtgggcaaagagctgcagaagcacttccccaacaagaccatccggtacaaccagtctgccggcggagacatggaaatcaccacacacagcttcaattgtggcggcgagttcttctactgcaataccagcaacctgttcaacagcacctacaacgacacctacatcagccccaactccaccaatagcaccagcatcatcaccctgcagtgcaagatcaagcagatcatcaatatgtggcaaggcgtcggccggtgtatgtacgcccctcctatcgccggcaacatcacatgcaagagcaatatcaccggcctgctgctcaccagagatggcggcattaacaacgtgtccaacgagacagagacattcagacccgctggcggcgacatgcgggacaattggagaagcgagctgtacaagtacaaggtggtggaagtgcagcccctgggaatcgctcctaccggctgcaagagaagagtggtggaaagacgcagacggcggagagctgttggactgggtgctctgttcctgggctttctgggagccgccggatctacaatgggagctgccagcatcacactgaccgtgcaggctagacagctgctgagcggaattgtgcagcagcagagcaacctgctgagagcccctgaagcacagcagcacatgctgcagctgacagtgtggggcatcaaacagctgcaggccagagtgctggccctggaaagatacctgaaggaccagcagctcctcggaatctggggctgttctggcaagctgatctgctgcaccaacgtgccctggaacacctcctggtccaacaagagcgagacagacatttggaacaacatgacctggatgcagtgggagagagagatcagcaactacaccggcaccatctacaagctgctggaagatagccagaaccagcaagagcggaacgagaaggacctgctggctctggactgatgaggatcc

SEQ ID NO: 345 - DNA, 2046 bp, synthetic construct
  source 1..2046: mol_type = other DNA
gtcgacgccaccatggatgctatgaagaggggcctgtgctgcgtgctgcttctgtgtggcgctgtgtttgtgtcccctagccaagagatccacgccagattcagaagaggcgccagagagggcaatctgtgggtcacagtgtactatggcgtgcccgtgtggaaagaggccaagaccacactgttctgtgccagcgacgccaaggcctacaagaaagaggtgcacaacgtctgggccacacacgcctgtgtgcctaccgatccatctcctcaagagctgttcctgaagaacgtgaccgagaacttcaacatgtggaagaacgacatggtggaccagatgcacgaggacatcatcagcctgtgggaccagagcctgaagccttgcgtgaagctgacccctctgtgcgtgaccctgatctgcagcaacgccatcgtgaagaacagcaccaccgagaagatgagcaatgtgaccgtgaacaacatcaccattgaggaaatgaagaactgcagcttcaacaccaccacagagatccgggacaagattaagaaagagcgggccctgttctacagacccgacatcgtgcccctgaacgacgagacaaacaacaccagcaagtaccggctgatcaactgcaacacctccgcctgcactcaggcctgtcctaaagtgaccttcgagcccattcctatccactactgtgcccctgccggctatgccatcctgaagtgcaacgacgaaaccttcaacggcacaggcccctgcagcaatgtgtccaccgtgcagtgtacccacggcatcagaccagtggtgtctacccagctgctgctgaatggaagcctggccgagaaagaaatcgtgatcagaagcgagaacctgaccaacaacgccaagatcatcattgtgcatctgcacgcccctgtggaaatcgtgtgcacccggccttacaacaacacccggaagtctgtgcggatcggccctggccagacattctatgccaccggcgatatcatcggcgaccctagacaggcccactgtaacatcagcaaagagatctggaacaagaccctgcaagaagtgggcaaagagctgcagaagcacttccccaacaagaccatccggtacaaccagtctgccggcggagacatggaaatcaccacacacagcttcaattgtggcggcgagttcttctactgcaataccagcaacctgttcaacagcacctacaacgacacctacatcagccccaactccaccaatagcaccagcatcatcaccctgcagtgcaagatcaagcagatcatcaatatgtggcaaggcgtcggccggtgtatgtacgcccctcctatcgccggcaacatcacatgcaagagcaatatcaccggcctgctgctcaccagagatggcggcattaacaacgtgtccaacgagacagagacattcagacccgctggcggcgacatgcgggacaattggagaagcgagctgtacaagtacaaggtggtggaagtgcagcccctgggaatcgctcctaccggctgcaagagaagagtggtggaaagacgcagacggcggagagctgttggactgggtgctctgttcctgggctttctgggagccgccggatctacaatgggagctgccagcatcacactgaccgtgcaggctagacagctgctgagcggaattgtgcagcagcagagcaacctgctgagagcccctgaagcacagcagcacatgctgcagctgacagtgtggggcatcaaacagctgcaggccagagtgctggccctggaaagatacctgaaggaccagcagctcctcggaatctggggctgttctggcaagctgatctgctgcaccaacgtgccctggaacacctcctggtccaacaagagcgagacagacatttggaacaacatgacctggatgcagtgggagagagagatcagcaactacaccggcaccatctacaagctgctggaagatagccagaaccagcaagagcggaacgagaaggacctgctggctctggactgatgaggatcc

SEQ ID NO: 346 - DNA, 2013 bp, synthetic construct
  source 1..2013: mol_type = other DNA
gtcgacgccaccatgcctatgggatctctgcagcctctggccacactgtacctgctgggaatgctggtggcttctgtgctggccgccgagaatctgtgggtcacagtgtactatggcgtgcccgtgtggaaagaggccaagaccacactgttctgtgccagcgacgccaaggcctacaagaaagaggtgcacaacgtctgggccacacacgcctgtgtgcctaccgatccatctcctcaagagctgttcctgaagaacgtgaccgagaacttcaacatgtggaagaacgacatggtggaccagatgcacgaggacatcatcagcctgtgggaccagagcctgaagccttgcgtgaagctgacccctctgtgcgtgaccctgatctgcagcaacgccatcgtgaagaacagcaccaccgagaagatgagcaatgtgaccgtgaacaacatcaccattgaggaaatgaagaactgcagcttcaacaccaccacagagatccgggacaagattaagaaagagcgggccctgttctacagacccgacatcgtgcccctgaacgacgagacaaacaacaccagcaagtaccggctgatcaactgcaacacctccgcctgcactcaggcctgtcctaaagtgaccttcgagcccattcctatccactactgtgcccctgccggctatgccatcctgaagtgcaacgacgaaaccttcaacggcacaggcccctgcagcaatgtgtccaccgtgcagtgtacccacggcatcagaccagtggtgtctacccagctgctgctgaatggaagcctggccgagaaagaaatcgtgatcagaagcgagaacctgaccaacaacgccaagatcatcattgtgcatctgcacgcccctgtggaaatcgtgtgcacccggccttacaacaacacccggaagtctgtgcggatcggccctggccagacattctatgccaccggcgatatcatcggcgaccctagacaggcccactgtaacatcagcaaagagatctggaacaagaccctgcaagaagtgggcaaagagctgcagaagcacttccccaacaagaccatccggtacaaccagtctgccggcggagacatggaaatcaccacacacagcttcaattgtggcggcgagttcttctactgcaataccagcaacctgttcaacagcacctacaacgacacctacatcagccccaactccaccaatagcaccagcatcatcaccctgcagtgcaagatcaagcagatcatcaatatgtggcaaggcgtcggccggtgtatgtacgcccctcctatcgccggcaacatcacatgcaagagcaatatcaccggcctgctgctcaccagagatggcggcattaacaacgtgtccaacgagacagagacattcagacccgctggcggcgacatgcgggacaattggagaagcgagctgtacaagtacaaggtggtcaagatcgagcccctgggcgtcgcaccaacacggtgcaagagaagagtcgtgggccgtcgtagaaggcggagagccgttggaattggcgccgtgttcctgggctttctgggagccgctggatctacaatgggcgctgccagcatgacactgaccgtgcaggctagaaatctgctgagcggcatcgtgcagcagcagagcaatctgctcagagcccctgaggctcagcagcacctcctgaaactgacagtgtggggcatcaagcagctgcaggcaagagtgctggcagtggaaagatacctgcgggaccagcagctcctcggaatctggggatgtagcggcaagctgatctgctgcaccaacgtgccctggaactccagctggtccaacagaaacctgagcgagatctgggataacatgacctggctgcagtgggacaaagaaatcagcaactacacccagatcatctacggactgctggaagagagccagaaccagcaagagaaaaacgagcaggacctgctggccctggactgataaggatcc

SEQ ID NO: 347 - DNA, 1974 bp, synthetic construct
  source 1..1974: mol_type = other DNA
gtcgacgccaccatgcctatgggatctctgcagcctctggccacactgtacctgctgggaatgctggtggcttctgtgctggccgagggcaatctgtgggtcacagtgtactatggcgtgcccgtgtggaaagaggccaagaccacactgttctgtgccagcgacgccaaggcctacgtgaaagaggtgcacaacgtctgggccacacacgcctgtgtgcctaccgatccatctcctcaagagctgttcctgaagaacgtgaccgagaacttcaacatgtggaagaacgacatggtggaccagatgcacgaggacatcatcagcctgtgggaccagagcctgaagccttgcgtgaagctgacccctctgtgcgtgaccctgatctgtagcaccgccaccgtgaacaacagcaagttcgaggaaatgaagaactgcagcttcaacaccaccaccgagatccgggacaaagagaagaaagagtacgccctgttctacaggcccgacatcgtgcccctggacaacgagacaagcaacatcagcgagtaccggctgatcaactgcaacaccagcgcctgcactcaggcctgtcctaaagtgaccttcgagcccattcctatccactactgtgcccctgccggctacgccatcctgaagtgcaacgacgagacattcaacggcacaggcccctgcagcaatgtgtccaccgtgcagtgtacccacggcatcagaccagtggtgtctacccagctgctgctgaatggaagcctggccgagaaagaaatcgtgatcagaagcgagaacctgaccaacaacgccaagatcatcattgtgcatctgcacacccctgtggaaatcgtgtgcacccggcctaacaacaacaccagaaagagcgtgcggatcggccctggccagaccttttatgccaccggcgacatcatcggcaaccccagacaggcccactgtaacatcagcaaagagcggtggaacgacaccctgcagaaagtgggcaaagagctgcagaagcacttccccaacaagaccatcaagtacaaccagagcgctggcggcgacatggaaatcaccacacacagcttcaattgtggcggcgagttcttctactgcaatacctccaacctgttcaacagcacctacaacgacacctacatcagcaccaactccaccaatagcaccagctacattaccctgcagtgccggatcaagcagatcatcaatatgtggcaaggcgtcggccggtgtatgtacgcccctcctatcgccggcaacatcacatgcaagtccaacatcaccggcctgctgctcacaagagatggcggcatcaacaaggacagcaacgaaaccgaaaccttccggcctgccggcggagacatgagagacaattggagaagcgagctgtacaagtacaaggtggtggaagtgcagcccctgggaatcgctcctaccggctgcaagagaagagtggtggaaagacgcagacggcggagagctgctggactgggtgctctgtttctgggctttctgggagccgccggatctacaatgggagctgccagcatcaccctgaccgtgcaggctagacaactgctgtctggcatcgtgcagcagcagagcaacctgctgagagcccctgaagctcagcagcacatgctgcagctgacagtgtggggcatcaaacagctgcaggccagagttctggccctggaaagatacctgaaggatcagcagctcctcggcatgtggggctgttctggcaagctgatctgctgcaccaacgtgccctggaacacctcctggtccaacaagagcgagacagacatctgggacaacatgacctggatgcagtgggagagagagatcagcaactacaccggcaccatctacaagctgctcgaggacagccagaaccagcaagagagaaacgagcaggacctgctggctctggactgatgaggatcc

SEQ ID NO: 348 - DNA, 2007 bp, synthetic construct
  source 1..2007: mol_type = other DNA
gtcgacgccaccatggatgctatgaagaggggcctgtgctgcgtgctgcttctgtgtggcgctgtgtttgtgtcccctagccaagagatccacgccagattcagaagaggcgccagagagggcaatctgtgggtcacagtgtactatggcgtgcccgtgtggaaagaggccaagaccacactgttctgtgccagcgacgccaaggcctacgtgaaagaggtgcacaacgtctgggccacacacgcctgtgtgcctaccgatccatctcctcaagagctgttcctgaagaacgtgaccgagaacttcaacatgtggaagaacgacatggtggaccagatgcacgaggacatcatcagcctgtgggaccagagcctgaagccttgcgtgaagctgacccctctgtgcgtgaccctgatctgtagcaccgccaccgtgaacaacagcaagttcgaggaaatgaagaactgcagcttcaacaccaccaccgagatccgggacaaagagaagaaagagtacgccctgttctacaggcccgacatcgtgcccctggacaacgagacaagcaacatcagcgagtaccggctgatcaactgcaacaccagcgcctgcactcaggcctgtcctaaagtgaccttcgagcccattcctatccactactgtgcccctgccggctacgccatcctgaagtgcaacgacgagacattcaacggcacaggcccctgcagcaatgtgtccaccgtgcagtgtacccacggcatcagaccagtggtgtctacccagctgctgctgaatggaagcctggccgagaaagaaatcgtgatcagaagcgagaacctgaccaacaacgccaagatcatcattgtgcatctgcacacccctgtggaaatcgtgtgcacccggcctaacaacaacaccagaaagagcgtgcggatcggccctggccagaccttttatgccaccggcgacatcatcggcaaccccagacaggcccactgtaacatcagcaaagagcggtggaacgacaccctgcagaaagtgggcaaagagctgcagaagcacttccccaacaagaccatcaagtacaaccagagcgctggcggcgacatggaaatcaccacacacagcttcaattgtggcggcgagttcttctactgcaatacctccaacctgttcaacagcacctacaacgacacctacatcagcaccaactccaccaatagcaccagctacattaccctgcagtgccggatcaagcagatcatcaatatgtggcaaggcgtcggccggtgtatgtacgcccctcctatcgccggcaacatcacatgcaagtccaacatcaccggcctgctgctcacaagagatggcggcatcaacaaggacagcaacgaaaccgaaaccttccggcctgccggcggagacatgagagacaattggagaagcgagctgtacaagtacaaggtggtggaagtgcagcccctgggaatcgctcctaccggctgcaagagaagagtggtggaaagacgcagacggcggagagctgctggactgggtgctctgtttctgggctttctgggagccgccggatctacaatgggagctgccagcatcaccctgaccgtgcaggctagacaactgctgtctggcatcgtgcagcagcagagcaacctgctgagagcccctgaagctcagcagcacatgctgcagctgacagtgtggggcatcaaacagctgcaggccagagttctggccctggaaagatacctgaaggatcagcagctcctcggcatgtggggctgttctggcaagctgatctgctgcaccaacgtgccctggaacacctcctggtccaacaagagcgagacagacatctgggacaacatgacctggatgcagtgggagagagagatcagcaactacaccggcaccatctacaagctgctcgaggacagccagaaccagcaagagagaaacgagcaggacctgctggctctggactgatgaggatcc

SEQ ID NO: 349 - DNA, 1974 bp, synthetic construct
  source 1..1974: mol_type = other DNA
gtcgacgccaccatgcctatgggatctctgcagcctctggccacactgtacctgctgggaatgctggtggcttctgtgctggccgccgagaatctggtcacagtgtactatggcgtgcccgtgtggaaagaggccaagaccacactgttctgtgccagcgacgccaaggcctacgtgaaagaggtgcacaacgtctgggccacacacgcctgtgtgcctaccgatccatctcctcaagagctgttcctgaagaacgtgaccgagaacttcaacatgtggaagaacgacatggtggaccagatgcacgaggacatcatcagcctgtgggaccagagcctgaagccttgcgtgaagctgacccctctgtgcgtgaccctgatctgtagcaccgccaccgtgaacaacagcaagttcgaggaaatgaagaactgcagcttcaacaccaccaccgagatccgggacaaagagaagaaagagtacgccctgttctacaggcccgacatcgtgcccctggacaacgagacaagcaacatcagcgagtaccggctgatcaactgcaacaccagcgcctgcactcaggcctgtcctaaagtgaccttcgagcccattcctatccactactgtgcccctgccggctacgccatcctgaagtgcaacgacgagacattcaacggcacaggcccctgcagcaatgtgtccaccgtgcagtgtacccacggcatcagaccagtggtgtctacccagctgctgctgaatggaagcctggccgagaaagaaatcgtgatcagaagcgagaacctgaccaacaacgccaagatcatcattgtgcatctgcacacccctgtggaaatcgtgtgcacccggcctaacaacaacaccagaaagagcgtgcggatcggccctggccagaccttttatgccaccggcgacatcatcggcaaccccagacaggcccactgtaacatcagcaaagagcggtggaacgacaccctgcagaaagtgggcaaagagctgcagaagcacttccccaacaagaccatcaagtacaaccagagcgctggcggcgacatggaaatcaccacacacagcttcaattgtggcggcgagttcttctactgcaatacctccaacctgttcaacagcacctacaacgacacctacatcagcaccaactccaccaatagcaccagctacattaccctgcagtgccggatcaagcagatcatcaatatgtggcaaggcgtcggccggtgtatgtacgcccctcctatcgccggcaacatcacatgcaagtccaacatcaccggcctgctgctcacaagagatggcggcatcaacaaggacagcaacgaaaccgaaaccttccggcctgccggcggagacatgagagacaattggagaagaagcgagctgtacaagtacaaggtggtcaagatcgagcccctgggcgtcgcaccaacacggtgcaagagaagagtcgtgggccgtcgtagaaggcggagagccgttggaattggcgccgtgttcctgggctttctgggagccgctggatctacaatgggcgctgccagcatgaccctgacagtgcaggctagaaatctgctgagcggcatcgtgcagcagcagagcaatctgctcagagcccctgaggctcagcagcacctcctgaaactgacagtgtggggcatcaagcagctgcaggcaagagtgctggcagtggaaagatacctgcgggaccagcagctcctcggaatctggggatgtagcggcaagctgatctgctgcaccaacgtgccctggaactccagctggtccaacagaaacctgagcgagatctgggataacatgacctggctgcagtgggacaaagaaatcagcaactacacccagatcatctacggactgctggaagagagccagaaccagcaagagaaaaacgagcaggacctgctggccctggactgataaggatcc

SEQ ID NO: 350 - protein, 655 aa, synthetic construct
MPMGSLQPLATLYLLGMLVASVLAAENLWVTVYYGVPVWEDADTPLFCASDAKAYSTESHNVWATHACVPTDPSPQEISLDNVTENFNMWKNNMVEQMHEDIISLWDESLKPCVKLTPLCVTLNCTNVNNSSATNNSMVDDREGLKNCSFNITTELRDKKKQEHALFYRLDIVPINGNSNSNSSVGDYRLINCNVSTCKQACPKMSFDPIPIHYCAPAGFAILKCRDKKFNGTGSCKNVSTVQCTHGIKPVISTQLLLNGSVAEEEIMIRSENFTNNAKNIIVQFNKTIDIMCTRPNNNTRKSISLGPGQAIYATGDIIGNIRQAHCNISGADWGNMIRNVSEKLKEIFNKTTITFKASAGGDLEITTHSFNCRGEFFYCDTSDLFNSSRFNNSSNDTNDTITLPCKIKQIVRMWQRVGQCMYAPPIAGNITCRSNITGLLLTRDGGGNNTNETETFRPAGGDMRDNWRSELYKYKVVKIEPLGVAPTRCKRRVVGRRRRRRAVGIGAVFLGFLGAAGSTMGAASMTLTVQARNLLSGIVQQQSNLLRAPEAQQHLLKLTVWGIKQLQARVLAVERYLRDQQLLGIWGCSGKLICCTNVPWNSSWSNRNLSEIWDNMTWLQWDKEISNYTQIIYGLLEESQNQQEKNEQDLLALD

SEQ ID NO: 351 - protein, 655 aa, synthetic construct
MPMGSLQPLATLYLLGMLVASVLASNNLWVTVYYGVPVWEDADTPLFCASDAKAYSTESHNVWATHACVPTDPSPQEISLDNVTENFNMWKNNMVEQMHEDIISLWDESLKPCVKLTPLCVTLNCTNVNNSSATNNSMVDDREGLKNCSFNITTELRDKKKQEHALFYRLDIVPINGNSNSNSSVGDYRLINCNVSTIKQACPKMSFDPIPIHYCAPAGFAILKCRDKKFNGTGSCKNVSTVQCTHGIKPVISTQLLLNGSVAEEEIMIRSENFTNNAKNIIVQFNKTIDIMCTRPNNNTRKSISLGPGQAIYATGDIIGNIRQAHCNISGADWGNMIRNVSEKLKEIFNKTTITFKASAGGDLEITTHSFNCRGEFFYCDTSDLFNSSRFNNSSNDTNDTITLPCKIKQIVRMWQRVGQAMYAPPIAGNITCRSNITGLLLTRDGGGNNTNETETFRPAGGDMRDNWRSELYKYKVVKINPLGVAPTRCRRRVVGRRRRRRAIGMGAVLLGFLGTAGSTMGAASITLTVQVRQLLSGIVQQQSNLLRAPEAQQHLLQLTVWGIKQLQARILAVERYLKDQQLLGIWGCSGKLICCTNVPWNASWSNRSYNDIWENLTWVEWEREISNYTQQIYSLLEESQNQQEKNEQDLLALD

SEQ ID NO: 352 - protein, 655 aa, synthetic construct
MPMGSLQPLATLYLLGMLVASVLASNNLWVTVYYGVPVWEDADTPLFCASDAKAYSTESHNVWATHACVPTDPSPQEISLDNVTENFNMWKNNMVEQMHEDIISLWDESLKPCVKLTPLCVTLNCTNVNNSSATNNSMVDDREGLKNCSFNITTELRDKKKQEHALFYRLDIVPINGNSNSNSSVGDYRLINCNVSTCKQACPKMSFDPIPIHYCAPAGFAILKCRDKKFNGTGSCKNVSTVQCTHGIKPVISTQLLLNGSVAEEEIMIRSENFTNNAKNIIVQFNKTIDIMCTRPNNNTRKSISLGPGQAIYATGDIIGNIRQAHCNISGADWGNMIRNVSEKLKEIFNKTTITFKASAGGDLEITTHSFNCRGEFFYCDTSDLFNSSRFNNSSNDTNDTITLPCKIKQIVRMWQRVGQCMYAPPIAGNITCRSNITGLLLTRDGGGNNTNETETFRPAGGDMRDNWRSELYKYKVVKINPLGVAPTRCRRRVVGRRRRRRAIGMGAVLLGFLGTAGSTMGAASITLTVQVRQLLSGIVQQQSNLLRAPEAQQHLLQLTVWGIKQLQARILAVERYLKDQQLLGIWGCSGKLICCTNVPWNASWSNRSYNDIWENLTWVEWEREISNYTQQIYSLLEESQNQQEKNEQDLLALD

SEQ ID NO: 353 - protein, 642 aa, synthetic construct
MPMGSLQPLATLYLLGMLVASVLASNNLWVTVYYGVPVWEDADTPLFCASDAKAYSTESHNVWATHACVPTDPSPQEISLDNVTENFNMWKNNMVEQMHEDIISLWDESLKPCVKLTPLCVTLNCTNVNNSSATNNSMVDDREGLKNCSFNITTELRDKKKQEHALFYRLDIVPINGNSNSNSSVGDYRLINCNVSTCKQACPKMSFDPIPIHYCAPAGFAILKCRDKKFNGTGSCKNVSTVQCTHGIKPVISTQLLLNGSVAEEEIMIRSENFTNNAKNIIVQFNKTIDIMCTRPNNNTRKSISLGPGQAIYATGDIIGNIRQAHCNISGADWGNMIRNVSEKLKEIFNKTTITFKASAGGDLEITTHSFNCRGEFFYCDTSDLFNSSRFNNSSNDTNDTITLPCKIKQIVRMWQRVGQCMYAPPIAGNITCRSNITGLLLTRDGGGNNTNETETFRPAGGDMRDNWRSELYKYKVVKINPLGVAPTRCRRRVVGRRRRRRAIGMGAVLLGFLGTAGSTMGAASITLTVQVRQLLSGNPDWLPDMTVWGIKQLQARILAVERYLKDQQLLGIWGCSGKLICCTNVPWNASWSNRSYNDIWENLTWVEWEREISNYTQQIYSLLEESQNQQEKNEQDLLALD

SEQ ID NO: 354 - protein, 655 aa, synthetic construct
MPMGSLQPLATLYLLGMLVASVLASNNLWVTVYYGVPVWEDACTPLFCASDAKAYSTKSRNVWATCCCVPTDPSPQEISLDNVTENFNMWKNNMVEQMHEDIISLWDESLKPCVKLTPLCVTLNCTNVNNSSATNNSMVDDREGLKNCSFNITTELRDKKKQEHALFYRLDIVPINGNSNSNSSVGDYRLINCNVSTIKQACPKMSFDPIPIHYCAPAGFAILKCRDKKFNGTGSCKNVSTVQCTHGIKPVISTQLLLNGSVAEEEIMIRSENFTNNAKNIIVQFNKTIDIMCTRPNNNTRKSISLGPGQAWYATGDIIGNIRQAHCNISGADWGNMIRNVSEKLKEIFNKTTITFKASAGGDLEITTHSFNCRGEFFYCDTSDLFNSSRFNNSSNDTNDTITLPCKIKQIVRMWQRVGQAMYAPPIAGNITCRSNITGLLLTRDGGGNNTNETETFRPAGGDMRDNWRSELYKYKVVKINPLGVAPTRCRRRVVGRRRRRRAIGMGAVLLGFLGTAGSTMGAASMTLTVQVRQLLSGIVQQQSNCLRAPECQQCLLQLTVWGIKQLQARILAVERYLKDQQLLGIWGCSGKLICCTNVPWNASWSNRSYNDIWENLTWVEWEREISNYTQQIYSLLEESQNQQEKNEQDLLALD

SEQ ID NO: 355 - protein, 655 aa, synthetic construct
MPMGSLQPLATLYLLGMLVASVLASNNLWVTVYYGVPVWEDAETPLFCASDAKAYSTEKHNVWATHACVPTDPSPQEISLDNVTENFNMWKNNMVEQMHTDIISLWDESLKPCVKLTPLCVTLNCTNVNNSSATNNSMVDDREGLKNCSFNITTELRDKKKQVHALFYRLDIVPINGNSNSNSSVGDYRLINCNVSTIKQACPKMSFDPIPIHYCAPAGFAILKCRDKKFNGTGSCKNVSTVQCTHGIKPVISTQLLLNGSVAEEEIMIRSENFTNNAKNIIVQFNKTIDIMCTRPNNNTRKSIRLGPGQAIYATGDIIGNIRQAHCNISGADWGNMIRNVSEKLKEIFNKTTITFKASAGGDLEITTHSFNCRGEFFYCDTSDLFNSSRFNNSSNDTNDTITLPCKIKQIVRMWQRVGQAMYAPPIAGNITCRSNITGLLLTRDGGGNNTNETETFRPAGGDMRDNWRSELYKYKVVKINPLGVAPTRCRRRVVGRRRRRRAIGMGAVLLGFLGTAGSTMGAASITLTVQVRNLLSGIVQQQSNLLRAPEAQQHLLQLTVWGIKQLQARILAVERYLRDQQLLGIWGCSGKLICCTNVPWNASWSNRSYNDIWENLTWVEWEREISNYTQQIYSLLEESQNQQEKNEQDLLALD

SEQ ID NO: 356 - protein, 666 aa, synthetic construct
MDAMKRGLCCVLLLCGAVFVSPSQEIHARFRRGARAENLWVTVYYGVPVWEDADTPLFCASDAKAYSTESHNVWATHACVPTDPSPQEISLDNVTENFNMWKNNMVEQMHEDIISLWDESLKPCVKLTPLCVTLNCTNVNNSSATNNSMVDDREGLKNCSFNITTELRDKKKQEHALFYRLDIVPINGNSNSNSSVGDYRLINCNVSTCKQACPKMSFDPIPIHYCAPAGFAILKCRDKKFNGTGSCKNVSTVQCTHGIKPVISTQLLLNGSVAEEEIMIRSENFTNNAKNIIVQFNKTIDIMCTRPNNNTRKSISLGPGQAIYATGDIIGNIRQAHCNISGADWGNMIRNVSEKLKEIFNKTTITFKASAGGDLEITTHSFNCRGEFFYCDTSDLFNSSRFNNSSNDTNDTITLPCKIKQIVRMWQRVGQCMYAPPIAGNITCRSNITGLLLTRDGGGNNTNETETFRPAGGDMRDNWRSELYKYKVVKIEPLGVAPTRCKRRVVGRRRRRRAVGIGAVFLGFLGAAGSTMGAASMTLTVQARNLLSGIVQQQSNLLRAPEAQQHLLKLTVWGIKQLQARVLAVERYLRDQQLLGIWGCSGKLICCTNVPWNSSWSNRNLSEIWDNMTWLQWDKEISNYTQIIYGLLEESQNQQEKNEQDLLALD

SEQ ID NO: 357 - protein, 666 aa, synthetic construct
MDAMKRGLCCVLLLCGAVFVSPSQEIHARFRRGARSNNLWVTVYYGVPVWEDADTPLFCASDAKAYSTESHNVWATHACVPTDPSPQEISLDNVTENFNMWKNNMVEQMHEDIISLWDESLKPCVKLTPLCVTLNCTNVNNSSATNNSMVDDREGLKNCSFNITTELRDKKKQEHALFYRLDIVPINGNSNSNSSVGDYRLINCNVSTIKQACPKMSFDPIPIHYCAPAGFAILKCRDKKFNGTGSCKNVSTVQCTHGIKPVISTQLLLNGSVAEEEIMIRSENFTNNAKNIIVQFNKTIDIMCTRPNNNTRKSISLGPGQAIYATGDIIGNIRQAHCNISGADWGNMIRNVSEKLKEIFNKTTITFKASAGGDLEITTHSFNCRGEFFYCDTSDLFNSSRFNNSSNDTNDTITLPCKIKQIVRMWQRVGQAMYAPPIAGNITCRSNITGLLLTRDGGGNNTNETETFRPAGGDMRDNWRSELYKYKVVKINPLGVAPTRCRRRVVGRRRRRRAIGMGAVLLGFLGTAGSTMGAASITLTVQVRQLLSGIVQQQSNLLRAPEAQQHLLQLTVWGIKQLQARILAVERYLKDQQLLGIWGCSGKLICCTNVPWNASWSNRSYNDIWENLTWVEWEREISNYTQQIYSLLEESQNQQEKNEQDLLALD

SEQ ID NO: 358 - protein, 666 aa, synthetic construct
MDAMKRGLCCVLLLCGAVFVSPSQEIHARFRRGARSNNLWVTVYYGVPVWEDADTPLFCASDAKAYSTESHNVWATHACVPTDPSPQEISLDNVTENFNMWKNNMVEQMHEDIISLWDESLKPCVKLTPLCVTLNCTNVNNSSATNNSMVDDREGLKNCSFNITTELRDKKKQEHALFYRLDIVPINGNSNSNSSVGDYRLINCNVSTCKQACPKMSFDPIPIHYCAPAGFAILKCRDKKFNGTGSCKNVSTVQCTHGIKPVISTQLLLNGSVAEEEIMIRSENFTNNAKNIIVQFNKTIDIMCTRPNNNTRKSISLGPGQAIYATGDIIGNIRQAHCNISGADWGNMIRNVSEKLKEIFNKTTITFKASAGGDLEITTHSFNCRGEFFYCDTSDLFNSSRFNNSSNDTNDTITLPCKIKQIVRMWQRVGQCMYAPPIAGNITCRSNITGLLLTRDGGGNNTNETETFRPAGGDMRDNWRSELYKYKVVKINPLGVAPTRCRRRVVGRRRRRRAIGMGAVLLGFLGTAGSTMGAASITLTVQVRQLLSGIVQQQSNLLRAPEAQQHLLQLTVWGIKQLQARILAVERYLKDQQLLGIWGCSGKLICCTNVPWNASWSNRSYNDIWENLTWVEWEREISNYTQQIYSLLEESQNQQEKNEQDLLALD

SEQ ID NO: 359 - protein, 653 aa, synthetic construct
MDAMKRGLCCVLLLCGAVFVSPSQEIHARFRRGARSNNLWVTVYYGVPVWEDADTPLFCASDAKAYSTESHNVWATHACVPTDPSPQEISLDNVTENFNMWKNNMVEQMHEDIISLWDESLKPCVKLTPLCVTLNCTNVNNSSATNNSMVDDREGLKNCSFNITTELRDKKKQEHALFYRLDIVPINGNSNSNSSVGDYRLINCNVSTCKQACPKMSFDPIPIHYCAPAGFAILKCRDKKFNGTGSCKNVSTVQCTHGIKPVISTQLLLNGSVAEEEIMIRSENFTNNAKNIIVQFNKTIDIMCTRPNNNTRKSISLGPGQAIYATGDIIGNIRQAHCNISGADWGNMIRNVSEKLKEIFNKTTITFKASAGGDLEITTHSFNCRGEFFYCDTSDLFNSSRFNNSSNDTNDTITLPCKIKQIVRMWQRVGQCMYAPPIAGNITCRSNITGLLLTRDGGGNNTNETETFRPAGGDMRDNWRSELYKYKVVKINPLGVAPTRCRRRVVGRRRRRRAIGMGAVLLGFLGTAGSTMGAASITLTVQVRQLLSGNPDWLPDMTVWGIKQLQARILAVERYLKDQQLLGIWGCSGKLICCTNVPWNASWSNRSYNDIWENLTWVEWEREISNYTQQIYSLLEESQNQQEKNEQDLLALD

SEQ ID NO: 360 - protein, 666 aa, synthetic construct
MDAMKRGLCCVLLLCGAVFVSPSQEIHARFRRGARSNNLWVTVYYGVPVWEDACTPLFCASDAKAYSTKSRNVWATCCCVPTDPSPQEISLDNVTENFNMWKNNMVEQMHEDIISLWDESLKPCVKLTPLCVTLNCTNVNNSSATNNSMVDDREGLKNCSFNITTELRDKKKQEHALFYRLDIVPINGNSNSNSSVGDYRLINCNVSTIKQACPKMSFDPIPIHYCAPAGFAILKCRDKKFNGTGSCKNVSTVQCTHGIKPVISTQLLLNGSVAEEEIMIRSENFTNNAKNIIVQFNKTIDIMCTRPNNNTRKSISLGPGQAWYATGDIIGNIRQAHCNISGADWGNMIRNVSEKLKEIFNKTTITFKASAGGDLEITTHSFNCRGEFFYCDTSDLFNSSRFNNSSNDTNDTITLPCKIKQIVRMWQRVGQAMYAPPIAGNITCRSNITGLLLTRDGGGNNTNETETFRPAGGDMRDNWRSELYKYKVVKINPLGVAPTRCRRRVVGRRRRRRAIGMGAVLLGFLGTAGSTMGAASMTLTVQVRQLLSGIVQQQSNCLRAPECQQCLLQLTVWGIKQLQARILAVERYLKDQQLLGIWGCSGKLICCTNVPWNASWSNRSYNDIWENLTWVEWEREISNYTQQIYSLLEESQNQQEKNEQDLLALD

SEQ ID NO: 361 - protein, 666 aa, synthetic construct
MDAMKRGLCCVLLLCGAVFVSPSQEIHARFRRGARSNNLWVTVYYGVPVWEDAETPLFCASDAKAYSTEKHNVWATHACVPTDPSPQEISLDNVTENFNMWKNNMVEQMHTDIISLWDESLKPCVKLTPLCVTLNCTNVNNSSATNNSMVDDREGLKNCSFNITTELRDKKKQVHALFYRLDIVPINGNSNSNSSVGDYRLINCNVSTIKQACPKMSFDPIPIHYCAPAGFAILKCRDKKFNGTGSCKNVSTVQCTHGIKPVISTQLLLNGSVAEEEIMIRSENFTNNAKNIIVQFNKTIDIMCTRPNNNTRKSIRLGPGQAIYATGDIIGNIRQAHCNISGADWGNMIRNVSEKLKEIFNKTTITFKASAGGDLEITTHSFNCRGEFFYCDTSDLFNSSRFNNSSNDTNDTITLPCKIKQIVRMWQRVGQAMYAPPIAGNITCRSNITGLLLTRDGGGNNTNETETFRPAGGDMRDNWRSELYKYKVVKINPLGVAPTRCRRRVVGRRRRRRAIGMGAVLLGFLGTAGSTMGAASITLTVQVRNLLSGIVQQQSNLLRAPEAQQHLLQLTVWGIKQLQARILAVERYLRDQQLLGIWGCSGKLICCTNVPWNASWSNRSYNDIWENLTWVEWEREISNYTQQIYSLLEESQNQQEKNEQDLLALD

SEQ ID NO: 362 - protein, 644 aa, synthetic construct
MGSLQPLATLYLLGMLVASVLAAENLWVTVYYGVPVWKEAKTTLFCASDAKAYDPEVHNVWATHACVPTDPNPQEMFLENVTENFNMWKNDMVEQMHQDIISLWSQSLKPCVKLTPLCVTLNCSDVINSTGTMKNCSFSVTTELRDRKQKKHALFYRLDIVPLDENDNSSKDYRLINCNTSTCTQACPKVTFDPIPIHYCAPAGYAILKCNNKTFNGTGPCNNVSTVQCTHGIKPVVSTQLLLNGSLAEEEVIIRSENLTDNVKTIIVQLKEPVGINCTRPNNNIRQSIRIGPGQTFFATGDIIGDIREAHCNISSTKWRETLQQVGGKLAKYFNNKTIKFTQHSGGDLEITTHSFNCRGEFFYCNTSQLFNSTYNETGSINGTGNSTIKLPCRIKQIINMWQGVGQCMYAPPIAGNIICRSKITGLLLTRDGGINKSEEIFRPGGGNMKDNWRDNWRSELYKYKVVKIEPLGVAPTRCKRRVVGRRRRRRAVGIGAVFLGFLGAAGSTMGAASMTLTVQARNLLSGIVQQQSNLLRAPEAQQHLLKLTVWGIKQLQARVLAVERYLRDQQLLGIWGCSGKLICCTNVPWNSSWSNRNLSEIWDNMTWLQWDKEISNYTQIIYGLLEESQNQQEKNEQDLLALD

SEQ ID NO: 363 - protein, 639 aa, synthetic construct
MGSLQPLATLYLLGMLVASVLANLWVTVYYGVPVWKEAKTTLFCASDAKAYDPEVHNVWATHACVPTDPNPQEMFLENVTENFNMWKNDMVEQMHQDIISLWSQSLKPCVKLTPLCVTLNCSDVINSTGTMKNCSFSVTTELRDRKQKKHALFYRLDIVPLDENDNSSKDYRLINCNTSTCTQACPKVTFDPIPIHYCAPAGYAILKCNNKTFNGTGPCNNVSTVQCTHGIKPVVSTQLLLNGSLAEEEVIIRSENLTDNVKTIIVQLKEPVGINCTRPNNNIRQSIRIGPGQTFFATGDIIGDIREAHCNISSTKWRETLQQVGGKLAKYFNNKTIKFTQHSGGDLEITTHSFNCRGEFFYCNTSQLFNSTYNETGSINGTGNSTIKLPCRIKQIINMWQGVGQCMYAPPIAGNIICRSKITGLLLTRDGGINKSEEIFRPGGGNMKDNWRSELYKYKVVEIKPLGVAPTKCKRRVVERRRRRRAVVGLGAVFLGFLGAAGSTMGAASITLTVQARQLLSGIVQQQNNLLRAPEAQQHMLQLTVWGIKQLQARVLAIERYLKDQQLLGIWGCSGKLICCTAVPWNSSWSNKSQEDIWDNMTWMQWDREISNYTNTIYRLLEDSQTQQEKNEKDLLALD

SEQ ID NO: 364 - protein, 639 aa, synthetic construct
MGSLQPLATLYLLGMLVASVLANLWVTVYYGVPVWKEACTTLFCASDAKAYDPKVRNVWATHCCVPTDPNPQEMFLENVTENFNMWKNDMVEQMHQDIISLWSQSLKPCVKLTPLCVTLNCSDVINSTGTMKNCSFSVTTELRDRKQKKHALFYRLDIVPLDENDNSSKDYRLINCNTSTCTQACPKVTFDPIPIHYCAPAGYAILKCNNKTFNGTGPCNNVSTVQCTHGIKPVVSTQLLLNGSLAEEEVIIRSENLTDNVKTIIVQLKEPVGINCTRPNNNIRQSIRIGPGQTWFATGDIIGDIREAHCNISSTKWRETLQQVGGKLAKYFNNKTIKFTQHSGGDLEITTHSFNCRGEFFYCNTSQLFNSTYNETGSINGTGNSTIKLPCRIKQIINMWQGVGQCMYAPPIAGNIICRSKITGLLLTRDGGINKSEEIFRPGGGNMKDNWRSELYKYKVVEIKPLGVAPTKCKRRVVERRRRRRAVVGLGAVFLGFLGAAGSTMGAASMTLTVQARQLLSGIVQQQNNCLRAPECQQCMLQLTVWGIKQLQARVLAIERYLKDQQLLGIWGCSGKLICCTAVPWNSSWSNKSQEDIWDNMTWMQWDREISNYTNTIYRLLEDSQTQQEKNEKDLLALD

SEQ ID NO: 365 - protein, 626 aa, synthetic construct
MGSLQPLATLYLLGMLVASVLANLWVTVYYGVPVWKEAKTTLFCASDAKAYDPEVHNVWATHACVPTDPNPQEMFLENVTENFNMWKNDMVEQMHQDIISLWSQSLKPCVKLTPLCVTLNCSDVINSTGTMKNCSFSVTTELRDRKQKKHALFYRLDIVPLDENDNSSKDYRLINCNTSTCTQACPKVTFDPIPIHYCAPAGYAILKCNNKTFNGTGPCNNVSTVQCTHGIKPVVSTQLLLNGSLAEEEVIIRSENLTDNVKTIIVQLKEPVGINCTRPNNNIRQSIRIGPGQTFFATGDIIGDIREAHCNISSTKWRETLQQVGGKLAKYFNNKTIKFTQHSGGDLEITTHSFNCRGEFFYCNTSQLFNSTYNETGSINGTGNSTIKLPCRIKQIINMWQGVGQCMYAPPIAGNIICRSKITGLLLTRDGGINKSEEIFRPGGGNMKDNWRSELYKYKVVEIKPLGVAPTKCKRRVVERRRRRRAVVGLGAVFLGFLGAAGSTMGAASITLTVQARQLLSGNPDWLPDMTVWGIKQLQARVLAIERYLKDQQLLGIWGCSGKLICCTAVPWNSSWSNKSQEDIWDNMTWMQWDREISNYTNTIYRLLEDSQTQQEKNEKDLLALD

SEQ ID NO: 366 - protein, 639 aa, synthetic construct
MGSLQPLATLYLLGMLVASVLANLWVTVYYGVPVWKDAETTLFCASDAKAYDPEKHNVWATHACVPTDPNPQEMFLENVTENFNMWKNDMVEQMHTDIISLWSQSLKPCVKLTPLCVTLNCSDVINSTGTMKNCSFSVTTELRDRKQKVHALFYRLDIVPLDENDNSSKDYRLINCNTSTCTQACPKVTFDPIPIHYCAPAGYAILKCNNKTFNGTGPCNNVSTVQCTHGIKPVVSTQLLLNGSLAEEEVIIRSENLTDNVKTIIVQLKEPVGINCTRPNNNIRQSIRIGPGQTFFATGDIIGDIREAHCNISSTKWRETLQQVGGKLAKYFNNKTIKFTQHSGGDLEITTHSFNCRGEFFYCNTSQLFNSTYNETGSINGTGNSTIKLPCRIKQIINMWQRVGQCMYAPPIAGNIICRSKITGLLLTRDGGINKSEEIFRPGGGNMKDNWRSELYKYKVVEIKPLGVAPTRCKRRVVERRRRRRAVVGLGAVFLGFLGAAGSTMGAASITLTVQARNLLSGIVQQQSNLLRAPEAQQHMLQLTVWGIKQLQARVLAIERYLRDQQLLGIWGCSGKLICCTAVPWNSSWSNKSQEDIWDNMTWMQWDREISNYTNTIYRLLEDSQTQQEKNEKDLLALD

SEQ ID NO: 367 - protein, 657 aa, synthetic construct
MDAMKRGLCCVLLLCGAVFVSPSQEIHARFRRGARAENLWVTVYYGVPVWKEAKTTLFCASDAKAYDPEVHNVWATHACVPTDPNPQEMFLENVTENFNMWKNDMVEQMHQDIISLWSQSLKPCVKLTPLCVTLNCSDVINSTGTMKNCSFSVTTELRDRKQKKHALFYRLDIVPLDENDNSSKDYRLINCNTSTCTQACPKVTFDPIPIHYCAPAGYAILKCNNKTFNGTGPCNNVSTVQCTHGIKPVVSTQLLLNGSLAEEEVIIRSENLTDNVKTIIVQLKEPVGINCTRPNNNIRQSIRIGPGQTFFATGDIIGDIREAHCNISSTKWRETLQQVGGKLAKYFNNKTIKFTQHSGGDLEITTHSFNCRGEFFYCNTSQLFNSTYNETGSINGTGNSTIKLPCRIKQIINMWQGVGQCMYAPPIAGNIICRSKITGLLLTRDGGINKSEEIFRPGGGNMKDNWRDNWRSELYKYKVVKIEPLGVAPTRCKRRVVGRRRRRRAVGIGAVFLGFLGAAGSTMGAASMTLTVQARNLLSGIVQQQSNLLRAPEAQQHLLKLTVWGIKQLQARVLAVERYLRDQQLLGIWGCSGKLICCTNVPWNSSWSNRNLSEIWDNMTWLQWDKEISNYTQIIYGLLEESQNQQEKNEQDLLALD

SEQ ID NO: 368 - protein, 652 aa, synthetic construct
MDAMKRGLCCVLLLCGAVFVSPSQEIHARFRRGARNLWVTVYYGVPVWKEAKTTLFCASDAKAYDPEVHNVWATHACVPTDPNPQEMFLENVTENFNMWKNDMVEQMHQDIISLWSQSLKPCVKLTPLCVTLNCSDVINSTGTMKNCSFSVTTELRDRKQKKHALFYRLDIVPLDENDNSSKDYRLINCNTSTCTQACPKVTFDPIPIHYCAPAGYAILKCNNKTFNGTGPCNNVSTVQCTHGIKPVVSTQLLLNGSLAEEEVIIRSENLTDNVKTIIVQLKEPVGINCTRPNNNIRQSIRIGPGQTFFATGDIIGDIREAHCNISSTKWRETLQQVGGKLAKYFNNKTIKFTQHSGGDLEITTHSFNCRGEFFYCNTSQLFNSTYNETGSINGTGNSTIKLPCRIKQIINMWQGVGQCMYAPPIAGNIICRSKITGLLLTRDGGINKSEEIFRPGGGNMKDNWRSELYKYKVVEIKPLGVAPTKCKRRVVERRRRRRAVVGLGAVFLGFLGAAGSTMGAASITLTVQARQLLSGIVQQQNNLLRAPEAQQHMLQLTVWGIKQLQARVLAIERYLKDQQLLGIWGCSGKLICCTAVPWNSSWSNKSQEDIWDNMTWMQWDREISNYTNTIYRLLEDSQTQQEKNEKDLLALD

SEQ ID NO: 369 - protein, 652 aa, synthetic construct
MDAMKRGLCCVLLLCGAVFVSPSQEIHARFRRGARNLWVTVYYGVPVWKEACTTLFCASDAKAYDPKVRNVWATHCCVPTDPNPQEMFLENVTENFNMWKNDMVEQMHQDIISLWSQSLKPCVKLTPLCVTLNCSDVINSTGTMKNCSFSVTTELRDRKQKKHALFYRLDIVPLDENDNSSKDYRLINCNTSTCTQACPKVTFDPIPIHYCAPAGYAILKCNNKTFNGTGPCNNVSTVQCTHGIKPVVSTQLLLNGSLAEEEVIIRSENLTDNVKTIIVQLKEPVGINCTRPNNNIRQSIRIGPGQTWFATGDIIGDIREAHCNISSTKWRETLQQVGGKLAKYFNNKTIKFTQHSGGDLEITTHSFNCRGEFFYCNTSQLFNSTYNETGSINGTGNSTIKLPCRIKQIINMWQGVGQCMYAPPIAGNIICRSKITGLLLTRDGGINKSEEIFRPGGGNMKDNWRSELYKYKVVEIKPLGVAPTKCKRRVVERRRRRRAVVGLGAVFLGFLGAAGSTMGAASMTLTVQARQLLSGIVQQQNNCLRAPECQQCMLQLTVWGIKQLQARVLAIERYLKDQQLLGIWGCSGKLICCTAVPWNSSWSNKSQEDIWDNMTWMQWDREISNYTNTIYRLLEDSQTQQEKNEKDLLALD

SEQ ID NO: 370 - protein, 639 aa, synthetic construct
MDAMKRGLCCVLLLCGAVFVSPSQEIHARFRRGARNLWVTVYYGVPVWKEAKTTLFCASDAKAYDPEVHNVWATHACVPTDPNPQEMFLENVTENFNMWKNDMVEQMHQDIISLWSQSLKPCVKLTPLCVTLNCSDVINSTGTMKNCSFSVTTELRDRKQKKHALFYRLDIVPLDENDNSSKDYRLINCNTSTCTQACPKVTFDPIPIHYCAPAGYAILKCNNKTFNGTGPCNNVSTVQCTHGIKPVVSTQLLLNGSLAEEEVIIRSENLTDNVKTIIVQLKEPVGINCTRPNNNIRQSIRIGPGQTFFATGDIIGDIREAHCNISSTKWRETLQQVGGKLAKYFNNKTIKFTQHSGGDLEITTHSFNCRGEFFYCNTSQLFNSTYNETGSINGTGNSTIKLPCRIKQIINMWQGVGQCMYAPPIAGNIICRSKITGLLLTRDGGINKSEEIFRPGGGNMKDNWRSELYKYKVVEIKPLGVAPTKCKRRVVERRRRRRAVVGLGAVFLGFLGAAGSTMGAASITLTVQARQLLSGNPDWLPDMTVWGIKQLQARVLAIERYLKDQQLLGIWGCSGKLICCTAVPWNSSWSNKSQEDIWDNMTWMQWDREISNYTNTIYRLLEDSQTQQEKNEKDLLALD

SEQ ID NO: 371 - protein, 652 aa, synthetic construct
MDAMKRGLCCVLLLCGAVFVSPSQEIHARFRRGARNLWVTVYYGVPVWKDAETTLFCASDAKAYDPEKHNVWATHACVPTDPNPQEMFLENVTENFNMWKNDMVEQMHTDIISLWSQSLKPCVKLTPLCVTLNCSDVINSTGTMKNCSFSVTTELRDRKQKVHALFYRLDIVPLDENDNSSKDYRLINCNTSTCTQACPKVTFDPIPIHYCAPAGYAILKCNNKTFNGTGPCNNVSTVQCTHGIKPVVSTQLLLNGSLAEEEVIIRSENLTDNVKTIIVQLKEPVGINCTRPNNNIRQSIRIGPGQTFFATGDIIGDIREAHCNISSTKWRETLQQVGGKLAKYFNNKTIKFTQHSGGDLEITTHSFNCRGEFFYCNTSQLFNSTYNETGSINGTGNSTIKLPCRIKQIINMWQRVGQCMYAPPIAGNIICRSKITGLLLTRDGGINKSEEIFRPGGGNMKDNWRSELYKYKVVEIKPLGVAPTRCKRRVVERRRRRRAVVGLGAVFLGFLGAAGSTMGAASITLTVQARNLLSGIVQQQSNLLRAPEAQQHMLQLTVWGIKQLQARVLAIERYLRDQQLLGIWGCSGKLICCTAVPWNSSWSNKSQEDIWDNMTWMQWDREISNYTNTIYRLLEDSQTQQEKNEKDLLALD

SEQ ID NO: 372 - protein, 649 aa, synthetic construct
MPMGSLQPLATLYLLGMLVASVLAKGKLWVTVYYGVPVWKEAKTTLFCASDARAYEKEVHNVWATHACVPTDPSPQELFLKNVTENFNMWKNDMVDQMHEDIISLWDQSLKPCVKLTPLCVTLICSNATVKNRTVEEMKNCSFNTTTEIRDKEKKEYALFYKPDVVPLDETNNTSEYRLINCNTSACTQACPKVTFEPIPIHYCAPAGYAILKCNNETFNGTGPCSNVSTVQCTHGIRPVVSTQLLLNGSLAEKEIVIRSENLTNNAKIIIVHLNTPVEIVCTRPNNNTRKSVRIGPGQTFYATGDIIGDIRQAHCNISEKQWNDTLQKVGKELKKHFPNKTIKYAQSAGGDMEITTHSFNCGGEFFYCNTAKLFNGTYNGTDISTNSSADSNSTITLQCRIKQIINMWQGVGRCMYAPPIAGNITCKSHITGLLLTRDGGTNSSGKEEIFRPAGGDMRDNWRSELYKYKVVEIQPLGIAPTGCKRRVVERRRRRRAAGLGALFLGFLGAAGSTMGAASITLTVQARQLLSGIVQQQSNLLRAPEAQQHMLQLTVWGIKQLQARVLALERYLKDQQLLGMWGCSGKLICCTNVPWNTSWSNKSETDIWDNMTWMQWEREISNYTETIYKLLEDSQNQQERNEQDLLALD

SEQ ID NO: 373 - protein, 660 aa, synthetic construct
MDAMKRGLCCVLLLCGAVFVSPSQEIHARFRRGARKGKLWVTVYYGVPVWKEAKTTLFCASDARAYEKEVHNVWATHACVPTDPSPQELFLKNVTENFNMWKNDMVDQMHEDIISLWDQSLKPCVKLTPLCVTLICSNATVKNRTVEEMKNCSFNTTTEIRDKEKKEYALFYKPDVVPLDETNNTSEYRLINCNTSACTQACPKVTFEPIPIHYCAPAGYAILKCNNETFNGTGPCSNVSTVQCTHGIRPVVSTQLLLNGSLAEKEIVIRSENLTNNAKIIIVHLNTPVEIVCTRPNNNTRKSVRIGPGQTFYATGDIIGDIRQAHCNISEKQWNDTLQKVGKELKKHFPNKTIKYAQSAGGDMEITTHSFNCGGEFFYCNTAKLFNGTYNGTDISTNSSADSNSTITLQCRIKQIINMWQGVGRCMYAPPIAGNITCKSHITGLLLTRDGGTNSSGKEEIFRPAGGDMRDNWRSELYKYKVVEIQPLGIAPTGCKRRVVERRRRRRAAGLGALFLGFLGAAGSTMGAASITLTVQARQLLSGIVQQQSNLLRAPEAQQHMLQLTVWGIKQLQARVLALERYLKDQQLLGMWGCSGKLICCTNVPWNTSWSNKSETDIWDNMTWMQWEREISNYTETIYKLLEDSQNQQERNEQDLLALD

SEQ ID NO: 374 - protein, 649 aa, synthetic construct
MPMGSLQPLATLYLLGMLVASVLAAENLWVTVYYGVPVWKEAKTTLFCASDARAYEKEVHNVWATHACVPTDPSPQELFLKNVTENFNMWKNDMVDQMHEDIISLWDQSLKPCVKLTPLCVTLICSNATVKNRTVEEMKNCSFNTTTEIRDKEKKEYALFYKPDVVPLDETNNTSEYRLINCNTSACTQACPKVTFEPIPIHYCAPAGYAILKCNNETFNGTGPCSNVSTVQCTHGIRPVVSTQLLLNGSLAEKEIVIRSENLTNNAKIIIVHLNTPVEIVCTRPNNNTRKSVRIGPGQTFYATGDIIGDIRQAHCNISEKQWNDTLQKVGKELKKHFPNKTIKYAQSAGGDMEITTHSFNCGGEFFYCNTAKLFNGTYNGTDISTNSSADSNSTITLQCRIKQIINMWQGVGRCMYAPPIAGNITCKSHITGLLLTRDGGTNSSGKEEIFRPAGGDMRDNWRSELYKYKVVKIEPLGVAPTRCKRRVVGRRRRRRAVGIGAVFLGFLGAAGSTMGAASMTLTVQARNLLSGIVQQQSNLLRAPEAQQHLLKLTVWGIKQLQARVLAVERYLRDQQLLGIWGCSGKLICCTNVPWNSSWSNRNLSEIWDNMTWLQWDKEISNYTQIIYGLLEESQNQQEKNEQDLLALD

SEQ ID NO: 375 - protein, 663 aa, synthetic construct
MPMGSLQPLATLYLLGMLVASVLAEGNLWVTVYYGVPVWKEAKTTLFCASDAKAYKKEVHNVWATHACVPTDPSPQELFLKNVTENFNMWKNDMVDQMHEDIISLWDQSLKPCVKLTPLCVTLICSNAIVKNSTTEKMSNVTVNNITIEEMKNCSFNTTTEIRDKIKKERALFYRPDIVPLNDETNNTSKYRLINCNTSACTQACPKVTFEPIPIHYCAPAGYAILKCNDETFNGTGPCSNVSTVQCTHGIRPVVSTQLLLNGSLAEKEIVIRSENLTNNAKIIIVHLHAPVEIVCTRPYNNTRKSVRIGPGQTFYATGDIIGDPRQAHCNISKEIWNKTLQEVGKELQKHFPNKTIRYNQSAGGDMEITTHSFNCGGEFFYCNTSNLFNSTYNDTYISPNSTNSTSIITLQCKIKQIINMWQGVGRCMYAPPIAGNITCKSNITGLLLTRDGGINNVSNETETFRPAGGDMRDNWRSELYKYKVVEVQPLGIAPTGCKRRVVERRRRRRAVGLGALFLGFLGAAGSTMGAASITLTVQARQLLSGIVQQQSNLLRAPEAQQHMLQLTVWGIKQLQARVLALERYLKDQQLLGIWGCSGKLICCTNVPWNTSWSNKSETDIWNNMTWMQWEREISNYTGTIYKLLEDSQNQQERNEKDLLALD

SEQ ID NO: 376 - protein, 674 aa, synthetic construct
MDAMKRGLCCVLLLCGAVFVSPSQEIHARFRRGAREGNLWVTVYYGVPVWKEAKTTLFCASDAKAYKKEVHNVWATHACVPTDPSPQELFLKNVTENFNMWKNDMVDQMHEDIISLWDQSLKPCVKLTPLCVTLICSNAIVKNSTTEKMSNVTVNNITIEEMKNCSFNTTTEIRDKIKKERALFYRPDIVPLNDETNNTSKYRLINCNTSACTQACPKVTFEPIPIHYCAPAGYAILKCNDETFNGTGPCSNVSTVQCTHGIRPVVSTQLLLNGSLAEKEIVIRSENLTNNAKIIIVHLHAPVEIVCTRPYNNTRKSVRIGPGQTFYATGDIIGDPRQAHCNISKEIWNKTLQEVGKELQKHFPNKTIRYNQSAGGDMEITTHSFNCGGEFFYCNTSNLFNSTYNDTYISPNSTNSTSIITLQCKIKQIINMWQGVGRCMYAPPIAGNITCKSNITGLLLTRDGGINNVSNETETFRPAGGDMRDNWRSELYKYKVVEVQPLGIAPTGCKRRVVERRRRRRAVGLGALFLGFLGAAGSTMGAASITLTVQARQLLSGIVQQQSNLLRAPEAQQHMLQLTVWGIKQLQARVLALERYLKDQQLLGIWGCSGKLICCTNVPWNTSWSNKSETDIWNNMTWMQWEREISNYTGTIYKLLEDSQNQQERNEKDLLALD

SEQ ID NO: 377 - protein, 663 aa, synthetic construct
MPMGSLQPLATLYLLGMLVASVLAAENLWVTVYYGVPVWKEAKTTLFCASDAKAYKKEVHNVWATHACVPTDPSPQELFLKNVTENFNMWKNDMVDQMHEDIISLWDQSLKPCVKLTPLCVTLICSNAIVKNSTTEKMSNVTVNNITIEEMKNCSFNTTTEIRDKIKKERALFYRPDIVPLNDETNNTSKYRLINCNTSACTQACPKVTFEPIPIHYCAPAGYAILKCNDETFNGTGPCSNVSTVQCTHGIRPVVSTQLLLNGSLAEKEIVIRSENLTNNAKIIIVHLHAPVEIVCTRPYNNTRKSVRIGPGQTFYATGDIIGDPRQAHCNISKEIWNKTLQEVGKELQKHFPNKTIRYNQSAGGDMEITTHSFNCGGEFFYCNTSNLFNSTYNDTYISPNSTNSTSIITLQCKIKQIINMWQGVGRCMYAPPIAGNITCKSNITGLLLTRDGGINNVSNETETFRPAGGDMRDNWRSELYKYKVVKIEPLGVAPTRCKRRVVGRRRRRRAVGIGAVFLGFLGAAGSTMGAASMTLTVQARNLLSGIVQQQSNLLRAPEAQQHLLKLTVWGIKQLQARVLAVERYLRDQQLLGIWGCSGKLICCTNVPWNSSWSNRNLSEIWDNMTWLQWDKEISNYTQIIYGLLEESQNQQEKNEQDLLALD

SEQ ID NO: 378 - protein, 650 aa, synthetic construct
MPMGSLQPLATLYLLGMLVASVLAEGNLWVTVYYGVPVWKEAKTTLFCASDAKAYVKEVHNVWATHACVPTDPSPQELFLKNVTENFNMWKNDMVDQMHEDIISLWDQSLKPCVKLTPLCVTLICSTATVNNSKFEEMKNCSFNTTTEIRDKEKKEYALFYRPDIVPLDNETSNISEYRLINCNTSACTQACPKVTFEPIPIHYCAPAGYAILKCNDETFNGTGPCSNVSTVQCTHGIRPVVSTQLLLNGSLAEKEIVIRSENLTNNAKIIIVHLHTPVEIVCTRPNNNTRKSVRIGPGQTFYATGDIIGNPRQAHCNISKERWNDTLQKVGKELQKHFPNKTIKYNQSAGGDMEITTHSFNCGGEFFYCNTSNLFNSTYNDTYISTNSTNSTSYITLQCRIKQIINMWQGVGRCMYAPPIAGNITCKSNITGLLLTRDGGINKDSNETETFRPAGGDMRDNWRSELYKYKVVEVQPLGIAPTGCKRRVVERRRRRRAAGLGALFLGFLGAAGSTMGAASITLTVQARQLLSGIVQQQSNLLRAPEAQQHMLQLTVWGIKQLQARVLALERYLKDQQLLGMWGCSGKLICCTNVPWNTSWSNKSETDIWDNMTWMQWEREISNYTGTIYKLLEDSQNQQERNEQDLLALD

SEQ ID NO: 379 - protein, 661 aa, synthetic construct
MDAMKRGLCCVLLLCGAVFVSPSQEIHARFRRGAREGNLWVTVYYGVPVWKEAKTTLFCASDAKAYVKEVHNVWATHACVPTDPSPQELFLKNVTENFNMWKNDMVDQMHEDIISLWDQSLKPCVKLTPLCVTLICSTATVNNSKFEEMKNCSFNTTTEIRDKEKKEYALFYRPDIVPLDNETSNISEYRLINCNTSACTQACPKVTFEPIPIHYCAPAGYAILKCNDETFNGTGPCSNVSTVQCTHGIRPVVSTQLLLNGSLAEKEIVIRSENLTNNAKIIIVHLHTPVEIVCTRPNNNTRKSVRIGPGQTFYATGDIIGNPRQAHCNISKERWNDTLQKVGKELQKHFPNKTIKYNQSAGGDMEITTHSFNCGGEFFYCNTSNLFNSTYNDTYISTNSTNSTSYITLQCRIKQIINMWQGVGRCMYAPPIAGNITCKSNITGLLLTRDGGINKDSNETETFRPAGGDMRDNWRSELYKYKVVEVQPLGIAPTGCKRRVVERRRRRRAAGLGALFLGFLGAAGSTMGAASITLTVQARQLLSGIVQQQSNLLRAPEAQQHMLQLTVWGIKQLQARVLALERYLKDQQLLGMWGCSGKLICCTNVPWNTSWSNKSETDIWDNMTWMQWEREISNYTGTIYKLLEDSQNQQERNEQDLLALD

SEQ ID NO: 380 - protein, 650 aa, synthetic construct
MPMGSLQPLATLYLLGMLVASVLAAENLVTVYYGVPVWKEAKTTLFCASDAKAYVKEVHNVWATHACVPTDPSPQELFLKNVTENFNMWKNDMVDQMHEDIISLWDQSLKPCVKLTPLCVTLICSTATVNNSKFEEMKNCSFNTTTEIRDKEKKEYALFYRPDIVPLDNETSNISEYRLINCNTSACTQACPKVTFEPIPIHYCAPAGYAILKCNDETFNGTGPCSNVSTVQCTHGIRPVVSTQLLLNGSLAEKEIVIRSENLTNNAKIIIVHLHTPVEIVCTRPNNNTRKSVRIGPGQTFYATGDIIGNPRQAHCNISKERWNDTLQKVGKELQKHFPNKTIKYNQSAGGDMEITTHSFNCGGEFFYCNTSNLFNSTYNDTYISTNSTNSTSYITLQCRIKQIINMWQGVGRCMYAPPIAGNITCKSNITGLLLTRDGGINKDSNETETFRPAGGDMRDNWRRSELYKYKVVKIEPLGVAPTRCKRRVVGRRRRRRAVGIGAVFLGFLGAAGSTMGAASMTLTVQARNLLSGIVQQQSNLLRAPEAQQHLLKLTVWGIKQLQARVLAVERYLRDQQLLGIWGCSGKLICCTNVPWNSSWSNRNLSEIWDNMTWLQWDKEISNYTQIIYGLLEESQNQQEKNEQDLLALD

SEQ ID NO: 381 - DNA, 1999 bp, synthetic construct
  source 1..1999: mol_type = other DNA
gtcgacaagcttcccgggccaccatgcccatgggctccctgcagcccctggccaccctgtacctgctgggcatgctggtggcctccgtgctggccgccgagaacctgtgggtgaccgtgtactacggcgtgcccgtgtggaaggaggccaagaccaccctgttctgcgcctccgacgccaaggcctacgagaaggaggtgcacaacgtgtgggccacccacgcctgcgtgcccaccgacccctccccccaggagctggtgctgaagaacgtgaccgagaacttcaacatgtggaagaacgacatggtggaccagatgcacgaggacatcatctccctgtgggaccagtccctgaagccctgcgtgaagctgacccccctgtgcgtgaccctgaactgctccaacgcccgctccaacgtgaacgtgacctccatcaacaacaccatcatgggcgagatgaagaactgctccttcaacaccaccaccgagatccgcgacaaggagaagaaggagtacgccctgttctacaagcccgacgtggtgcccctgaacgagacctccaacacctccgagtaccgcctgatcaactgcaacacctccgcctgcacccaggcctgccccaaggtgaccttcgagcccatccccatccactactgcgcccccgccggctacgccatcctgaagtgcaacaacaagaccttcaacggcaccggcccctgctccaacgtgtccaccgtgcagtgcacccacggcatccgccccgtggtgtccacccagctgctgctgaacggctccctggccgagaaggagatcgtgatccgctccgagaacctgaccaacaacgccaagatcatcatcgtgcacctgaacacctccgtggagatcgtgtgcacccgccccggcaacaacacccgcaagtccgtgcgcatcggccccggccagaccttctacgccaccggcgacatcatcggcgacatccgccaggcccactgcaacatctccgagggccagtggaacaagaccctgcacgaggtgtccaaggagctgcagaagcacttccccaacaagaccatcaagtacgagcgctccgccggcggcgacatggagatcgccacccactccttcaactgcggcggcgagttcttctactgcaacacctccaacctgttcaacggcacctacaacggcacctacatcaacacctcctccacctcctacatcaccctgcagtgccgcatcaagcagatcatcaacatgtggcagggcgtgggccgctgcatgtacgccccccccatcgccggcaacatcacctgcaagtccaacatcaccggcctgctgctgacccgcgacggcggcaccaagaacaactccaacgaggagaccttccgccccgccggcggcgacatgcgcgacaactggcgctccgagctgtacaagtacaaggtggtgaagatcgagcccctgggcgtggcccccacccgctgcaagcgccgcgtggtgggccgccgccgccgccgccgcgccgtgggcatcggcgccgtgttcctgggcttcctgggcgccgccggctccaccatgggcgccgcctccatgaccctgaccgtgcaggcccgcaacctgctgtccggcatcgtgcagcagcagtccaacctgctgcgcgcccccgaggcccagcagcacctgctgaagctgaccgtgtggggcatcaagcagctgcaggcccgcgtgctggccgtggagcgctacctgcgcgaccagcagctgctgggcatctggggctgctccggcaagctgatctgctgcaccaacgtgccctggaactcctcctggtccaaccgcaacctgtccgagatctgggacaacatgacctggctgcagtgggacaaggagatctccaactacacccagatcatctacggcctgctggaggagtcccagaaccagcaggagaagaacgagcaggacctgctggccctggactagtaagcggccgcggatcc

SEQ ID NO: 382 - DNA, 1999 bp, synthetic construct
  source 1..1999: mol_type = other DNA
gtcgacaagcttcccgggccaccatgcccatgggctccctgcagcccctggccaccctgtacctgctgggcatgctggtggcctccgtgctggccgccgagaacctgtgggtgaccgtgtactacggcgtgcccgtgtggaaggaggccaagaccaccctgttctgcgcctccgacgccaaggcctacgagaagaaggtgcacaacgtgtgggccacccacgcctgcgtgcccaccgacccctccccccaggagctggtgctgaagaacgtgaccgagaacttcaacatgtggaagaacgacatggtggaccagatgcacgaggacatcatctccctgtgggaccagtccctgaagccctgcgtgaagctgacccccctgtgcgtgaccctgaactgctccaacgcccgctccaacgtgaacgtgacctccatcaacaacaccatcatgggcgagatgaagaactgctccttcaacaccaccaccgagatccgcgacaaggagaagaaggagtacgccctgttctacaagcccgacgtggtgcccctgaacgagacctccaacacctccgagtaccgcctgatcaactgcaacacctccgccgtgacccaggcctgccccaaggtgaccttcgagcccatccccatccactactgcgcccccgccggctacgccatcctgaagtgcaacaacaagaccttcaacggcaccggcccctgctccaacgtgtccaccgtgcagtgcacccacggcatccgccccgtggtgtccacccagctgctgctgaacggctccctggccgagaaggagatcgtgatccgctccgagaacctgaccaacaacgccaagatcatcatcgtgcacctgaacacctccgtggagatcgtgtgcacccgccccggcaacaacacccgcaagtccgtgcgcatcggccccggccagtggttctacgccaccggcgacatcatcggcgacatccgccaggcccactgcaacatctccgagggccagtggaacaagaccctgcacgaggtgtccaaggagctgcagaagcacttccccaacaagaccatcaagtacgagcgctccgccggcggcgacatggagatcgccacccactccttcaactgcggcggcgagttcttctactgcaacacctccaacctgttcaacggcacctacaacggcacctacatcaacacctcctccacctcctacatcaccctgcagtgccgcatcaagcagatcatcaacatgtggcagggcgtgggccgcgccatgtacgccccccccatcgccggcaacatcacctgcaagtccaacatcaccggcctgctgctgacccgcgacggcggcaccaagaacaactccaacgaggagaccttccgccccgccggcggcgacatgcgcgacaactggcgctccgagctgtacaagtacaaggtggtgaagatcgagcccctgggcgtggcccccacccgctgcaagcgccgcgtggtgggccgccgccgccgccgccgcgccgtgggcatcggcgccgtgttcctgggcttcctgggcgccgccggctccaccatgggcgccgcctccatgaccctgaccgtgcaggcccgcaacctgctgtccggcatcgtgcagcagcagtccaacctgctgcgcgcccccgaggcccagcagcacctgctgaagctgaccgtgtggggcatcaagcagctgcaggcccgcgtgctggccgtggagcgctacctgcgcgaccagcagctgctgggcatctggggctgctccggcaagctgatctgctgcaccaacgtgccctggaactcctcctggtccaaccgcaacctgtccgagatctgggacaacatgacctggctgcagtgggacaaggagatctccaactacacccagatcatctacggcctgctggaggagtcccagaaccagcaggagaagaacgagcaggacctgctggccctggactagtaagcggccgcggatcc

SEQ ID NO: 383 - DNA, 1999 bp, synthetic construct
  source 1..1999: mol_type = other DNA
gtcgacaagcttcccgggccaccatgcccatgggctccctgcagcccctggccaccctgtacctgctgggcatgctggtggcctccgtgctggccgccgagaacctgtgggtgaccgtgtactacggcgtgcccgtgtggaaggaggccaagaccaccctgttctgcgcctccgacgccaaggcctacgagaaggaggtgcacaacgtgtgggccacccacgcctgcgtgcccaccgacccctccccccaggagctggtgctgaagaacgtgaccgagaacttcaacatgtggaagaacgacatggtggaccagatgcacgaggacatcatctccctgtgggaccagtccctgaagccctgcgtgaagctgacccccctgtgcgtgaccctgaactgctccaacgcccgctccaacgtgaacgtgacctccatcaacaacaccatcatgggcgagatgaagaactgctccttcaacaccaccaccgagatccgcgacaaggagaagaaggagtacgccctgttctacaagcccgacgtggtgcccctgaacgagacctccaacacctccgagtaccgcctgatcaactgcaacacctccgcctgcacccaggcctgccccaaggtgaccttcgagcccatccccatccactactgcgcccccgccggctacgccatcctgaagtgcaacaacaagaccttcaacggcaccggcccctgctccaacgtgtccaccgtgcagtgcacccacggcatccgccccgtggtgtccacccagctgctgctgaacggctccctggccgagaaggagatcgtgatccgctccgagaacctgaccaacaacgccaagatcatcatcgtgcacctgaacacctccgtggagatcgtgtgcacccgccccggcaacaacacccgcaagtccgtgcgcatcggccccggccagaccttctacgccaccggcgacatcatcggcgacatccgccaggcccactgcaacatctccgagggccagtggaacaagaccctgcacgaggtgtccaaggagctgcagaagcacttccccaacaagaccatcaagtacgagcgctccgccggcggccgcatggagatcgccacccactccttcaactgcggcggcgagttcttctactgcaacacctccaacctgttcaacggcacctacaacggcacctacatcaacacctcctccacctcctacatcaccctgcagtgccgcatcaagcagatcatcaacatgtggcagggcgtgggccgctgcatgtacgccccccccatcgccggcaacatcacctgcaagtccaacatcaccggcctgctgctgacccgcgacggcggcaccaagaacaactccaacgaggagaccttccgccccgccggcggcgacatgcgcgacaactggcgctccgagctgtacaagtacaaggtggtgaagatcgagcccctgggcgtggcccccacccgctgcaagcgccgcgtggtgggccgccgccgccgccgccgcgccgtgggcatcggcgccgtgttcctgggcttcctgggcgccgccggctccaccatgggcgccgcctccatgaccctgaccgtgcaggcccgcaacctgctgtccggcatcgtgcagcagcagtccaacctgctgcgcgcccccgaggcccagcagcacctgctgaagctgaccgtgtggggcatcaagcagctgcaggcccgcgtgctggccgtggagcgctacctgcgcgaccagcagctgctgggcatctggggctgctccggcaagctgatctgctgcaccaacgtgccctggaactcctcctggtccaaccgcaacctgtccgagatctgggacaacatgacctggctgcagtgggacaaggagatctccaactacacccagatcatctacggcctgctggaggagtcccagaaccagcaggagaagaacgagcaggacctgctggccctggactagtaagcggccgcggatcc

SEQ ID NO: 384 - DNA, 2017 bp, synthetic construct
  source 1..2017: mol_type = other DNA
gtcgacaagcttcccgggccaccatgcccatgggctccctgcagcccctggccaccctgtacctgctgggcatgctggtggcctccgtgctggccgccgagaacctgtgggtgaccgtgtactacggcgtgcccgtgtggaaggaggccaagaccaccctgttctgcgcctccgacgccaaggcctacgagaaggaggtgcacaacgtgtgggccacccacgcctgcgtgcccaccgacccctccccccaggagctggtgctgaagaacgtgaccgagaacttcaacatgtggaagaacgacatggtggaccagatgcacgaggacatcatctccctgtgggaccagtccctgaagccctgcgtgaagctgacccccctgtgcgtgaccctgaactgctccaacgcccgctccaacgtgaacgtgacctccatcaacaacaccatcatgggcgagatgaagaactgctccttcaacaccaccaccgagatccgcgacaaggagaagaaggagtacgccctgttctacaagcccgacgtggtgcccctgaacgagacctccaacacctccgagtaccgcctgatcaactgcaacacctccgcctgcacccaggcctgccccaaggtgaccttcgagcccatccccatccactactgcgcccccgccggctacgccatcctgaagtgcaacaacaagaccttcaacggcaccggcccctgctccaacgtgtccaccgtgcagtgcacccacggcatccgccccgtggtgtccacccagctgctgctgaacggctccctggccgagaaggagatcgtgatccgctccgagaacctgaccaacaacgccaagatcatcatcgtgcacctgaacacctccgtggagatcgtgtgcacccgccccggcaacaacacccgcaagtccgtgcgcatcggccccggccagaccttctacgccaccggcgacatcatcggcgacatccgccaggcccactgcaacatctccgagggccagtggaacaagaccctgcacgaggtgtccaaggagctgcagaagcacttccccaacaagaccatcaagtacgagcgctccgccggcggcgacatggagatcgccacccactccttcaactgcggcggcgagttcttctactgcaacacctccaacctgttcaacggcacctacaacggcacctacatcaacacctcctccacctcctacatcaccctgcagtgccgcatcaagcagatcatcaacatgtggcagggcgtgggccgctgcatgtacgccccccccatcgccggcaacatcacctgcaagtccaacatcaccggcctgctgctgacccgcgacggcggcaccaagaacaactccaacgaggagaccttccgccccgccggcggcgacatgcgcgacaactggcgctccgagctgtacaagtacaaggtggtgaagatcgagcccctgggcgtggcccccacccgctgcaagcgccgcgtggtgggccgccgccgccgccgccgcgccgtgggcatcggcgccgtgttcctgggcttcctgggcgccgccggctccaccatgggcgccgcctccatgaccctgaccgtgcaggcccgcaacctgctgtccggcatcgtgcagcagcagtccaacctgctgcgcgcccccgaggcccagcagcacctgctgaagctgaccgtgtggggcatcaagcagctgcaggcccgcgtgctggccgtggagcgctacctgcgcgaccagcagctgctgggcatctggggctgctccggcaagctgatctgctgcaccaacgtgccctggaactcctcctggtccaaccgcaacctgtccgagatctgggacaacatgacctggctgcagtgggacaaggagatctccaactacacccagatcatctacggcctgctggaggagtcccagaaccagcaggagaagaacgagcaggacctgctggccctggacctgcctgagaccggaggatagtaagcggccgcggatcc

SEQ ID NO: 385 - DNA, 2503 bp, synthetic construct
  source 1..2503: mol_type = other DNA
gtcgacaagcttcccgggccaccatgcccatgggctccctgcagcccctggccaccctgtacctgctgggcatgctggtggcctccgtgctggccgccgagaacctgtgggtgaccgtgtactacggcgtgcccgtgtggaaggaggccaagaccaccctgttctgcgcctccgacgccaaggcctacgagaaggaggtgcacaacgtgtgggccacccacgcctgcgtgcccaccgacccctccccccaggagctggtgctgaagaacgtgaccgagaacttcaacatgtggaagaacgacatggtggaccagatgcacgaggacatcatctccctgtgggaccagtccctgaagccctgcgtgaagctgacccccctgtgcgtgaccctgaactgctccaacgcccgctccaacgtgaacgtgacctccatcaacaacaccatcatgggcgagatgaagaactgctccttcaacaccaccaccgagatccgcgacaaggagaagaaggagtacgccctgttctacaagcccgacgtggtgcccctgaacgagacctccaacacctccgagtaccgcctgatcaactgcaacacctccgcctgcacccaggcctgccccaaggtgaccttcgagcccatccccatccactactgcgcccccgccggctacgccatcctgaagtgcaacaacaagaccttcaacggcaccggcccctgctccaacgtgtccaccgtgcagtgcacccacggcatccgccccgtggtgtccacccagctgctgctgaacggctccctggccgagaaggagatcgtgatccgctccgagaacctgaccaacaacgccaagatcatcatcgtgcacctgaacacctccgtggagatcgtgtgcacccgccccggcaacaacacccgcaagtccgtgcgcatcggccccggccagaccttctacgccaccggcgacatcatcggcgacatccgccaggcccactgcaacatctccgagggccagtggaacaagaccctgcacgaggtgtccaaggagctgcagaagcacttccccaacaagaccatcaagtacgagcgctccgccggcggcgacatggagatcgccacccactccttcaactgcggcggcgagttcttctactgcaacacctccaacctgttcaacggcacctacaacggcacctacatcaacacctcctccacctcctacatcaccctgcagtgccgcatcaagcagatcatcaacatgtggcagggcgtgggccgctgcatgtacgccccccccatcgccggcaacatcacctgcaagtccaacatcaccggcctgctgctgacccgcgacggcggcaccaagaacaactccaacgaggagaccttccgccccgccggcggcgacatgcgcgacaactggcgctccgagctgtacaagtacaaggtggtgaagatcgagcccctgggcgtggcccccacccgctgcaagcgccgcgtggtgggccgccgccgccgccgccgcgccgtgggcatcggcgccgtgttcctgggcttcctgggcgccgccggctccaccatgggcgccgcctccatgaccctgaccgtgcaggcccgcaacctgctgtccggcatcgtgcagcagcagtccaacctgctgcgcgcccccgaggcccagcagcacctgctgaagctgaccgtgtggggcatcaagcagctgcaggcccgcgtgctggccgtggagcgctacctgcgcgaccagcagctgctgggcatctggggctgctccggcaagctgatctgctgcaccaacgtgccctggaactcctcctggtccaaccgcaacctgtccgagatctgggacaacatgacctggctgcagtgggacaaggagatctccaactacacccagatcatctacggcctgctggaggagtcccagaaccagcaggagaagaacgagcaggacctgctggccctggacggtggtggaagcggagatatcatcaagctgctgaacgagcaagtgaacaaagagatgaacagctccaacctgtacatgagcatgtccagctggtgctacacccacagccttgatggcgccggactgttcctgtttgatcacgccgccgaggaatacgagcacgccaagaagctgatcattttcctgaacgagaacaacgtgccagtgcagctgaccagcattagcgccccagagcacaagttcgagggcctgacacagatctttcagaaggcctacgaacacgagcagcacatctccgagagcatcaacaacatcgtggaccacgccattaagagcaaggatcacgccaccttcaattttctgcagtggtacgtggccgaacagcacgaggaagaagtgctgttcaaggacatcctggacaagattgagctgatcggcaacgagaaccacggcctgtatctggccgaccagtacgtgaagggaatcgccaagagccggaagtcctagtaagcggccgcggatcc

SEQ ID NO: 386 - DNA, 2029 bp, synthetic construct
  source 1..2029: mol_type = other DNA
gtcgacaagcttcccgggccaccatgcccatgggctccctgcagcccctggccaccctgtacctgctgggcatgctggtggcctccgtgctggccgccgagaacctgtgggtgaccgtgtactacggcgtgcccgtgtggaaggaggccaagaccaccctgttctgcgcctccgacgccaaggcctacaagaaggaggtgcacaacgtgtgggccacccacgcctgcgtgcccaccgacccctccccccaggagctgttcctgaagaacgtgaccgagaacttcaacatgtggaagaacgacatggtggaccagatgcacgaggacatcatctccctgtgggaccagtccctgaagccctgcgtgaagctgacccccctgtgcgtgaccctgatctgctccaacgccatcgtgaagaactccaccaccgaggagatgtccaccgccctggtgaagaactccaccaccgaggccatgaagaactgctccttcaacaccaccaccgagatccgcgacaaggagaagaaggagtacgccctgttctaccgccccgacatcgtgcccctgaacaacgagaccggcaacatctccgagtaccgcctgatcaactgcaacacctccgcctgcacccaggcctgccccaaggtgaccttcgagcccatccccatccactactgcgcccccgccggctacgccatcctgaagtgcaacgacgagaccttcaacggcaccggcccctgctccaacgtgtccaccgtgcagtgcacccacggcatccgccccgtggtgtccacccagctgctgctgaacggctccctggccaaggaggagatcgtgatccgctccgagaacctgaccaacaacgccaagatcatcatcgtgcacctgcacacccccgtggagatcgtgtgcacccgccccaacaacaacacccgcaagtccgtgcgcatcggccccggccagaccttctacgccaccggcgacatcatcggcgacccccgcaaggcccactgcaacatctccgagaaggactggaacaagaccctgcaggaggtgggcaaggagctgcagaagcacttccccaacaagaccatccgctacaaccagtccgccggcggcgacatggagatcaccacccactccttcaactgcggcggcgagttcttctactgcaacacctccaagctgttcaactccacctacaacgacacctacatctccaccaactcctccgccaacaactcctccaccatcaccctgcagtgccgcatcaagcagatcatcaacatgtggcagggcgtgggccgctgcatgtacgccccccccatcgccggcaacatcacctgcaagtccaacatcaccggcctgctgctgacccgcgacggcggccccgactccaacgagaccgagaccttccgccccgccggcggcgacatgcgcgacaactggcgctccgagctgtacaagtacaaggtggtgaagatcgagcccctgggcgtggcccccacccgctgcaagcgccgcgtggtgggccgccgccgccgccgccgcgccgtgggcatcggcgccgtgttcctgggcttcctgggcgccgccggctccaccatgggcgccgcctccatgaccctgaccgtgcaggcccgcaacctgctgtccggcatcgtgcagcagcagtccaacctgctgcgcgcccccgaggcccagcagcacctgctgaagctgaccgtgtggggcatcaagcagctgcaggcccgcgtgctggccgtggagcgctacctgcgcgaccagcagctgctgggcatctggggctgctccggcaagctgatctgctgcaccaacgtgccctggaactcctcctggtccaaccgcaacctgtccgagatctgggacaacatgacctggctgcagtgggacaaggagatctccaactacacccagatcatctacggcctgctggaggagtcccagaaccagcaggagaagaacgagcaggacctgctggccctggactagtaagcggccgcggatcc

SEQ ID NO: 387 - DNA, 2029 bp, synthetic construct
  source 1..2029: mol_type = other DNA
gtcgacaagcttcccgggccaccatgcccatgggctccctgcagcccctggccaccctgtacctgctgggcatgctggtggcctccgtgctggccgccgagaacctgtgggtgaccgtgtactacggcgtgcccgtgtggaaggaggccaagaccaccctgttctgcgcctccgacgccaaggcctacaagaagaaggtgcacaacgtgtgggccacccacgcctgcgtgcccaccgacccctccccccaggagctgttcctgaagaacgtgaccgagaacttcaacatgtggaagaacgacatggtggaccagatgcacgaggacatcatctccctgtgggaccagtccctgaagccctgcgtgaagctgacccccctgtgcgtgaccctgatctgctccaacgccatcgtgaagaactccaccaccgaggagatgtccaccgccctggtgaagaactccaccaccgaggccatgaagaactgctccttcaacaccaccaccgagatccgcgacaaggagaagaaggagtacgccctgttctaccgccccgacatcgtgcccctgaacaacgagaccggcaacatctccgagtaccgcctgatcaactgcaacacctccgccgtgacccaggcctgccccaaggtgaccttcgagcccatccccatccactactgcgcccccgccggctacgccatcctgaagtgcaacgacgagaccttcaacggcaccggcccctgctccaacgtgtccaccgtgcagtgcacccacggcatccgccccgtggtgtccacccagctgctgctgaacggctccctggccaaggaggagatcgtgatccgctccgagaacctgaccaacaacgccaagatcatcatcgtgcacctgcacacccccgtggagatcgtgtgcacccgccccaacaacaacacccgcaagtccgtgcgcatcggccccggccagtggttctacgccaccggcgacatcatcggcgacccccgcaaggcccactgcaacatctccgagaaggactggaacaagaccctgcaggaggtgggcaaggagctgcagaagcacttccccaacaagaccatccgctacaaccagtccgccggcggcgacatggagatcaccacccactccttcaactgcggcggcgagttcttctactgcaacacctccaagctgttcaactccacctacaacgacacctacatctccaccaactcctccgccaacaactcctccaccatcaccctgcagtgccgcatcaagcagatcatcaacatgtggcagggcgtgggccgcgccatgtacgccccccccatcgccggcaacatcacctgcaagtccaacatcaccggcctgctgctgacccgcgacggcggccccgactccaacgagaccgagaccttccgccccgccggcggcgacatgcgcgacaactggcgctccgagctgtacaagtacaaggtggtgaagatcgagcccctgggcgtggcccccacccgctgcaagcgccgcgtggtgggccgccgccgccgccgccgcgccgtgggcatcggcgccgtgttcctgggcttcctgggcgccgccggctccaccatgggcgccgcctccatgaccctgaccgtgcaggcccgcaacctgctgtccggcatcgtgcagcagcagtccaacctgctgcgcgcccccgaggcccagcagcacctgctgaagctgaccgtgtggggcatcaagcagctgcaggcccgcgtgctggccgtggagcgctacctgcgcgaccagcagctgctgggcatctggggctgctccggcaagctgatctgctgcaccaacgtgccctggaactcctcctggtccaaccgcaacctgtccgagatctgggacaacatgacctggctgcagtgggacaaggagatctccaactacacccagatcatctacggcctgctggaggagtcccagaaccagcaggagaagaacgagcaggacctgctggccctggactagtaagcggccgcggatcc

SEQ ID NO: 388 - DNA, 2029 bp, synthetic construct
  source 1..2029: mol_type = other DNA
gtcgacaagcttcccgggccaccatgcccatgggctccctgcagcccctggccaccctgtacctgctgggcatgctggtggcctccgtgctggccgccgagaacctgtgggtgaccgtgtactacggcgtgcccgtgtggaaggaggccaagaccaccctgttctgcgcctccgacgccaaggcctacaagaaggaggtgcacaacgtgtgggccacccacgcctgcgtgcccaccgacccctccccccaggagctgttcctgaagaacgtgaccgagaacttcaacatgtggaagaacgacatggtggaccagatgcacgaggacatcatctccctgtgggaccagtccctgaagccctgcgtgaagctgacccccctgtgcgtgaccctgatctgctccaacgccatcgtgaagaactccaccaccgaggagatgtccaccgccctggtgaagaactccaccaccgaggccatgaagaactgctccttcaacaccaccaccgagatccgcgacaaggagaagaaggagtacgccctgttctaccgccccgacatcgtgcccctgaacaacgagaccggcaacatctccgagtaccgcctgatcaactgcaacacctccgcctgcacccaggcctgccccaaggtgaccttcgagcccatccccatccactactgcgcccccgccggctacgccatcctgaagtgcaacgacgagaccttcaacggcaccggcccctgctccaacgtgtccaccgtgcagtgcacccacggcatccgccccgtggtgtccacccagctgctgctgaacggctccctggccaaggaggagatcgtgatccgctccgagaacctgaccaacaacgccaagatcatcatcgtgcacctgcacacccccgtggagatcgtgtgcacccgccccaacaacaacacccgcaagtccgtgcgcatcggccccggccagaccttctacgccaccggcgacatcatcggcgacccccgcaaggcccactgcaacatctccgagaaggactggaacaagaccctgcaggaggtgggcaaggagctgcagaagcacttccccaacaagaccatccgctacaaccagtccgccggcggccgcatggagatcaccacccactccttcaactgcggcggcgagttcttctactgcaacacctccaagctgttcaactccacctacaacgacacctacatctccaccaactcctccgccaacaactcctccaccatcaccctgcagtgccgcatcaagcagatcatcaacatgtggcagggcgtgggccgctgcatgtacgccccccccatcgccggcaacatcacctgcaagtccaacatcaccggcctgctgctgacccgcgacggcggccccgactccaacgagaccgagaccttccgccccgccggcggcgacatgcgcgacaactggcgctccgagctgtacaagtacaaggtggtgaagatcgagcccctgggcgtggcccccacccgctgcaagcgccgcgtggtgggccgccgccgccgccgccgcgccgtgggcatcggcgccgtgttcctgggcttcctgggcgccgccggctccaccatgggcgccgcctccatgaccctgaccgtgcaggcccgcaacctgctgtccggcatcgtgcagcagcagtccaacctgctgcgcgcccccgaggcccagcagcacctgctgaagctgaccgtgtggggcatcaagcagctgcaggcccgcgtgctggccgtggagcgctacctgcgcgaccagcagctgctgggcatctggggctgctccggcaagctgatctgctgcaccaacgtgccctggaactcctcctggtccaaccgcaacctgtccgagatctgggacaacatgacctggctgcagtgggacaaggagatctccaactacacccagatcatctacggcctgctggaggagtcccagaaccagcaggagaagaacgagcaggacctgctggccctggactagtaagcggccgcggatcc

SEQ ID NO: 389 - DNA, 2047 bp, synthetic construct
  source 1..2047: mol_type = other DNA
gtcgacaagcttcccgggccaccatgcccatgggctccctgcagcccctggccaccctgtacctgctgggcatgctggtggcctccgtgctggccgccgagaacctgtgggtgaccgtgtactacggcgtgcccgtgtggaaggaggccaagaccaccctgttctgcgcctccgacgccaaggcctacaagaaggaggtgcacaacgtgtgggccacccacgcctgcgtgcccaccgacccctccccccaggagctgttcctgaagaacgtgaccgagaacttcaacatgtggaagaacgacatggtggaccagatgcacgaggacatcatctccctgtgggaccagtccctgaagccctgcgtgaagctgacccccctgtgcgtgaccctgatctgctccaacgccatcgtgaagaactccaccaccgaggagatgtccaccgccctggtgaagaactccaccaccgaggccatgaagaactgctccttcaacaccaccaccgagatccgcgacaaggagaagaaggagtacgccctgttctaccgccccgacatcgtgcccctgaacaacgagaccggcaacatctccgagtaccgcctgatcaactgcaacacctccgcctgcacccaggcctgccccaaggtgaccttcgagcccatccccatccactactgcgcccccgccggctacgccatcctgaagtgcaacgacgagaccttcaacggcaccggcccctgctccaacgtgtccaccgtgcagtgcacccacggcatccgccccgtggtgtccacccagctgctgctgaacggctccctggccaaggaggagatcgtgatccgctccgagaacctgaccaacaacgccaagatcatcatcgtgcacctgcacacccccgtggagatcgtgtgcacccgccccaacaacaacacccgcaagtccgtgcgcatcggccccggccagaccttctacgccaccggcgacatcatcggcgacccccgcaaggcccactgcaacatctccgagaaggactggaacaagaccctgcaggaggtgggcaaggagctgcagaagcacttccccaacaagaccatccgctacaaccagtccgccggcggcgacatggagatcaccacccactccttcaactgcggcggcgagttcttctactgcaacacctccaagctgttcaactccacctacaacgacacctacatctccaccaactcctccgccaacaactcctccaccatcaccctgcagtgccgcatcaagcagatcatcaacatgtggcagggcgtgggccgctgcatgtacgccccccccatcgccggcaacatcacctgcaagtccaacatcaccggcctgctgctgacccgcgacggcggccccgactccaacgagaccgagaccttccgccccgccggcggcgacatgcgcgacaactggcgctccgagctgtacaagtacaaggtggtgaagatcgagcccctgggcgtggcccccacccgctgcaagcgccgcgtggtgggccgccgccgccgccgccgcgccgtgggcatcggcgccgtgttcctgggcttcctgggcgccgccggctccaccatgggcgccgcctccatgaccctgaccgtgcaggcccgcaacctgctgtccggcatcgtgcagcagcagtccaacctgctgcgcgcccccgaggcccagcagcacctgctgaagctgaccgtgtggggcatcaagcagctgcaggcccgcgtgctggccgtggagcgctacctgcgcgaccagcagctgctgggcatctggggctgctccggcaagctgatctgctgcaccaacgtgccctggaactcctcctggtccaaccgcaacctgtccgagatctgggacaacatgacctggctgcagtgggacaaggagatctccaactacacccagatcatctacggcctgctggaggagtcccagaaccagcaggagaagaacgagcaggacctgctggccctggacctgcctgagaccggaggatagtaagcggccgcggatcc

SEQ ID NO: 390 - DNA, 2533 bp, synthetic construct
  source 1..2533: mol_type = other DNA
gtcgacaagcttcccgggccaccatgcccatgggctccctgcagcccctggccaccctgtacctgctgggcatgctggtggcctccgtgctggccgccgagaacctgtgggtgaccgtgtactacggcgtgcccgtgtggaaggaggccaagaccaccctgttctgcgcctccgacgccaaggcctacaagaaggaggtgcacaacgtgtgggccacccacgcctgcgtgcccaccgacccctccccccaggagctgttcctgaagaacgtgaccgagaacttcaacatgtggaagaacgacatggtggaccagatgcacgaggacatcatctccctgtgggaccagtccctgaagccctgcgtgaagctgacccccctgtgcgtgaccctgatctgctccaacgccatcgtgaagaactccaccaccgaggagatgtccaccgccctggtgaagaactccaccaccgaggccatgaagaactgctccttcaacaccaccaccgagatccgcgacaaggagaagaaggagtacgccctgttctaccgccccgacatcgtgcccctgaacaacgagaccggcaacatctccgagtaccgcctgatcaactgcaacacctccgcctgcacccaggcctgccccaaggtgaccttcgagcccatccccatccactactgcgcccccgccggctacgccatcctgaagtgcaacgacgagaccttcaacggcaccggcccctgctccaacgtgtccaccgtgcagtgcacccacggcatccgccccgtggtgtccacccagctgctgctgaacggctccctggccaaggaggagatcgtgatccgctccgagaacctgaccaacaacgccaagatcatcatcgtgcacctgcacacccccgtggagatcgtgtgcacccgccccaacaacaacacccgcaagtccgtgcgcatcggccccggccagaccttctacgccaccggcgacatcatcggcgacccccgcaaggcccactgcaacatctccgagaaggactggaacaagaccctgcaggaggtgggcaaggagctgcagaagcacttccccaacaagaccatccgctacaaccagtccgccggcggcgacatggagatcaccacccactccttcaactgcggcggcgagttcttctactgcaacacctccaagctgttcaactccacctacaacgacacctacatctccaccaactcctccgccaacaactcctccaccatcaccctgcagtgccgcatcaagcagatcatcaacatgtggcagggcgtgggccgctgcatgtacgccccccccatcgccggcaacatcacctgcaagtccaacatcaccggcctgctgctgacccgcgacggcggccccgactccaacgagaccgagaccttccgccccgccggcggcgacatgcgcgacaactggcgctccgagctgtacaagtacaaggtggtgaagatcgagcccctgggcgtggcccccacccgctgcaagcgccgcgtggtgggccgccgccgccgccgccgcgccgtgggcatcggcgccgtgttcctgggcttcctgggcgccgccggctccaccatgggcgccgcctccatgaccctgaccgtgcaggcccgcaacctgctgtccggcatcgtgcagcagcagtccaacctgctgcgcgcccccgaggcccagcagcacctgctgaagctgaccgtgtggggcatcaagcagctgcaggcccgcgtgctggccgtggagcgctacctgcgcgaccagcagctgctgggcatctggggctgctccggcaagctgatctgctgcaccaacgtgccctggaactcctcctggtccaaccgcaacctgtccgagatctgggacaacatgacctggctgcagtgggacaaggagatctccaactacacccagatcatctacggcctgctggaggagtcccagaaccagcaggagaagaacgagcaggacctgctggccctggacggtggtggaagcggagatatcatcaagctgctgaacgagcaagtgaacaaagagatgaacagctccaacctgtacatgagcatgtccagctggtgctacacccacagccttgatggcgccggactgttcctgtttgatcacgccgccgaggaatacgagcacgccaagaagctgatcattttcctgaacgagaacaacgtgccagtgcagctgaccagcattagcgccccagagcacaagttcgagggcctgacacagatctttcagaaggcctacgaacacgagcagcacatctccgagagcatcaacaacatcgtggaccacgccattaagagcaaggatcacgccaccttcaattttctgcagtggtacgtggccgaacagcacgaggaagaagtgctgttcaaggacatcctggacaagattgagctgatcggcaacgagaaccacggcctgtatctggccgaccagtacgtgaagggaatcgccaagagccggaagtcctagtaagcggccgcggatcc

SEQ ID NO: 391 - protein, 652 aa, synthetic construct
MPMGSLQPLATLYLLGMLVASVLAAENLWVTVYYGVPVWKEAKTTLFCASDAKAYEKEVHNVWATHACVPTDPSPQELVLKNVTENFNMWKNDMVDQMHEDIISLWDQSLKPCVKLTPLCVTLNCSNARSNVNVTSINNTIMGEMKNCSFNTTTEIRDKEKKEYALFYKPDVVPLNETSNTSEYRLINCNTSACTQACPKVTFEPIPIHYCAPAGYAILKCNNKTFNGTGPCSNVSTVQCTHGIRPVVSTQLLLNGSLAEKEIVIRSENLTNNAKIIIVHLNTSVEIVCTRPGNNTRKSVRIGPGQTFYATGDIIGDIRQAHCNISEGQWNKTLHEVSKELQKHFPNKTIKYERSAGGDMEIATHSFNCGGEFFYCNTSNLFNGTYNGTYINTSSTSYITLQCRIKQIINMWQGVGRCMYAPPIAGNITCKSNITGLLLTRDGGTKNNSNEETFRPAGGDMRDNWRSELYKYKVVKIEPLGVAPTRCKRRVVGRRRRRRAVGIGAVFLGFLGAAGSTMGAASMTLTVQARNLLSGIVQQQSNLLRAPEAQQHLLKLTVWGIKQLQARVLAVERYLRDQQLLGIWGCSGKLICCTNVPWNSSWSNRNLSEIWDNMTWLQWDKEISNYTQIIYGLLEESQNQQEKNEQDLLALD

SEQ ID NO: 392 - protein, 652 aa, synthetic construct
MPMGSLQPLATLYLLGMLVASVLAAENLWVTVYYGVPVWKEAKTTLFCASDAKAYEKKVHNVWATHACVPTDPSPQELVLKNVTENFNMWKNDMVDQMHEDIISLWDQSLKPCVKLTPLCVTLNCSNARSNVNVTSINNTIMGEMKNCSFNTTTEIRDKEKKEYALFYKPDVVPLNETSNTSEYRLINCNTSAVTQACPKVTFEPIPIHYCAPAGYAILKCNNKTFNGTGPCSNVSTVQCTHGIRPVVSTQLLLNGSLAEKEIVIRSENLTNNAKIIIVHLNTSVEIVCTRPGNNTRKSVRIGPGQWFYATGDIIGDIRQAHCNISEGQWNKTLHEVSKELQKHFPNKTIKYERSAGGDMEIATHSFNCGGEFFYCNTSNLFNGTYNGTYINTSSTSYITLQCRIKQIINMWQGVGRAMYAPPIAGNITCKSNITGLLLTRDGGTKNNSNEETFRPAGGDMRDNWRSELYKYKVVKIEPLGVAPTRCKRRVVGRRRRRRAVGIGAVFLGFLGAAGSTMGAASMTLTVQARNLLSGIVQQQSNLLRAPEAQQHLLKLTVWGIKQLQARVLAVERYLRDQQLLGIWGCSGKLICCTNVPWNSSWSNRNLSEIWDNMTWLQWDKEISNYTQIIYGLLEESQNQQEKNEQDLLALD

SEQ ID NO: 393 - protein, 652 aa, synthetic construct
MPMGSLQPLATLYLLGMLVASVLAAENLWVTVYYGVPVWKEAKTTLFCASDAKAYEKEVHNVWATHACVPTDPSPQELVLKNVTENFNMWKNDMVDQMHEDIISLWDQSLKPCVKLTPLCVTLNCSNARSNVNVTSINNTIMGEMKNCSFNTTTEIRDKEKKEYALFYKPDVVPLNETSNTSEYRLINCNTSACTQACPKVTFEPIPIHYCAPAGYAILKCNNKTFNGTGPCSNVSTVQCTHGIRPVVSTQLLLNGSLAEKEIVIRSENLTNNAKIIIVHLNTSVEIVCTRPGNNTRKSVRIGPGQTFYATGDIIGDIRQAHCNISEGQWNKTLHEVSKELQKHFPNKTIKYERSAGGRMEIATHSFNCGGEFFYCNTSNLFNGTYNGTYINTSSTSYITLQCRIKQIINMWQGVGRCMYAPPIAGNITCKSNITGLLLTRDGGTKNNSNEETFRPAGGDMRDNWRSELYKYKVVKIEPLGVAPTRCKRRVVGRRRRRRAVGIGAVFLGFLGAAGSTMGAASMTLTVQARNLLSGIVQQQSNLLRAPEAQQHLLKLTVWGIKQLQARVLAVERYLRDQQLLGIWGCSGKLICCTNVPWNSSWSNRNLSEIWDNMTWLQWDKEISNYTQIIYGLLEESQNQQEKNEQDLLALD

SEQ ID NO: 394 - protein, 658 aa, synthetic construct
MPMGSLQPLATLYLLGMLVASVLAAENLWVTVYYGVPVWKEAKTTLFCASDAKAYEKEVHNVWATHACVPTDPSPQELVLKNVTENFNMWKNDMVDQMHEDIISLWDQSLKPCVKLTPLCVTLNCSNARSNVNVTSINNTIMGEMKNCSFNTTTEIRDKEKKEYALFYKPDVVPLNETSNTSEYRLINCNTSACTQACPKVTFEPIPIHYCAPAGYAILKCNNKTFNGTGPCSNVSTVQCTHGIRPVVSTQLLLNGSLAEKEIVIRSENLTNNAKIIIVHLNTSVEIVCTRPGNNTRKSVRIGPGQTFYATGDIIGDIRQAHCNISEGQWNKTLHEVSKELQKHFPNKTIKYERSAGGDMEIATHSFNCGGEFFYCNTSNLFNGTYNGTYINTSSTSYITLQCRIKQIINMWQGVGRCMYAPPIAGNITCKSNITGLLLTRDGGTKNNSNEETFRPAGGDMRDNWRSELYKYKVVKIEPLGVAPTRCKRRVVGRRRRRRAVGIGAVFLGFLGAAGSTMGAASMTLTVQARNLLSGIVQQQSNLLRAPEAQQHLLKLTVWGIKQLQARVLAVERYLRDQQLLGIWGCSGKLICCTNVPWNSSWSNRNLSEIWDNMTWLQWDKEISNYTQIIYGLLEESQNQQEKNEQDLLALDLPETGG

SEQ ID NO: 395 - protein, 820 aa, synthetic construct
MPMGSLQPLATLYLLGMLVASVLAAENLWVTVYYGVPVWKEAKTTLFCASDAKAYEKEVHNVWATHACVPTDPSPQELVLKNVTENFNMWKNDMVDQMHEDIISLWDQSLKPCVKLTPLCVTLNCSNARSNVNVTSINNTIMGEMKNCSFNTTTEIRDKEKKEYALFYKPDVVPLNETSNTSEYRLINCNTSACTQACPKVTFEPIPIHYCAPAGYAILKCNNKTFNGTGPCSNVSTVQCTHGIRPVVSTQLLLNGSLAEKEIVIRSENLTNNAKIIIVHLNTSVEIVCTRPGNNTRKSVRIGPGQTFYATGDIIGDIRQAHCNISEGQWNKTLHEVSKELQKHFPNKTIKYERSAGGDMEIATHSFNCGGEFFYCNTSNLFNGTYNGTYINTSSTSYITLQCRIKQIINMWQGVGRCMYAPPIAGNITCKSNITGLLLTRDGGTKNNSNEETFRPAGGDMRDNWRSELYKYKVVKIEPLGVAPTRCKRRVVGRRRRRRAVGIGAVFLGFLGAAGSTMGAASMTLTVQARNLLSGIVQQQSNLLRAPEAQQHLLKLTVWGIKQLQARVLAVERYLRDQQLLGIWGCSGKLICCTNVPWNSSWSNRNLSEIWDNMTWLQWDKEISNYTQIIYGLLEESQNQQEKNEQDLLALDGGGSGDIIKLLNEQVNKEMNSSNLYMSMSSWCYTHSLDGAGLFLFDHAAEEYEHAKKLIIFLNENNVPVQLTSISAPEHKFEGLTQIFQKAYEHEQHISESINNIVDHAIKSKDHATFNFLQWYVAEQHEEEVLFKDILDKIELIGNENHGLYLADQYVKGIAKSRKS

SEQ ID NO: 396 - protein, 662 aa, synthetic construct
MPMGSLQPLATLYLLGMLVASVLAAENLWVTVYYGVPVWKEAKTTLFCASDAKAYKKEVHNVWATHACVPTDPSPQELFLKNVTENFNMWKNDMVDQMHEDIISLWDQSLKPCVKLTPLCVTLICSNAIVKNSTTEEMSTALVKNSTTEAMKNCSFNTTTEIRDKEKKEYALFYRPDIVPLNNETGNISEYRLINCNTSACTQACPKVTFEPIPIHYCAPAGYAILKCNDETFNGTGPCSNVSTVQCTHGIRPVVSTQLLLNGSLAKEEIVIRSENLTNNAKIIIVHLHTPVEIVCTRPNNNTRKSVRIGPGQTFYATGDIIGDPRKAHCNISEKDWNKTLQEVGKELQKHFPNKTIRYNQSAGGDMEITTHSFNCGGEFFYCNTSKLFNSTYNDTYISTNSSANNSSTITLQCRIKQIINMWQGVGRCMYAPPIAGNITCKSNITGLLLTRDGGPDSNETETFRPAGGDMRDNWRSELYKYKVVKIEPLGVAPTRCKRRVVGRRRRRRAVGIGAVFLGFLGAAGSTMGAASMTLTVQARNLLSGIVQQQSNLLRAPEAQQHLLKLTVWGIKQLQARVLAVERYLRDQQLLGIWGCSGKLICCTNVPWNSSWSNRNLSEIWDNMTWLQWDKEISNYTQIIYGLLEESQNQQEKNEQDLLALD

SEQ ID NO: 397 - protein, 662 aa, synthetic construct
MPMGSLQPLATLYLLGMLVASVLAAENLWVTVYYGVPVWKEAKTTLFCASDAKAYKKKVHNVWATHACVPTDPSPQELFLKNVTENFNMWKNDMVDQMHEDIISLWDQSLKPCVKLTPLCVTLICSNAIVKNSTTEEMSTALVKNSTTEAMKNCSFNTTTEIRDKEKKEYALFYRPDIVPLNNETGNISEYRLINCNTSAVTQACPKVTFEPIPIHYCAPAGYAILKCNDETFNGTGPCSNVSTVQCTHGIRPVVSTQLLLNGSLAKEEIVIRSENLTNNAKIIIVHLHTPVEIVCTRPNNNTRKSVRIGPGQWFYATGDIIGDPRKAHCNISEKDWNKTLQEVGKELQKHFPNKTIRYNQSAGGDMEITTHSFNCGGEFFYCNTSKLFNSTYNDTYISTNSSANNSSTITLQCRIKQIINMWQGVGRAMYAPPIAGNITCKSNITGLLLTRDGGPDSNETETFRPAGGDMRDNWRSELYKYKVVKIEPLGVAPTRCKRRVVGRRRRRRAVGIGAVFLGFLGAAGSTMGAASMTLTVQARNLLSGIVQQQSNLLRAPEAQQHLLKLTVWGIKQLQARVLAVERYLRDQQLLGIWGCSGKLICCTNVPWNSSWSNRNLSEIWDNMTWLQWDKEISNYTQIIYGLLEESQNQQEKNEQDLLALD

SEQ ID NO: 398 - protein, 662 aa, synthetic construct
MPMGSLQPLATLYLLGMLVASVLAAENLWVTVYYGVPVWKEAKTTLFCASDAKAYKKEVHNVWATHACVPTDPSPQELFLKNVTENFNMWKNDMVDQMHEDIISLWDQSLKPCVKLTPLCVTLICSNAIVKNSTTEEMSTALVKNSTTEAMKNCSFNTTTEIRDKEKKEYALFYRPDIVPLNNETGNISEYRLINCNTSACTQACPKVTFEPIPIHYCAPAGYAILKCNDETFNGTGPCSNVSTVQCTHGIRPVVSTQLLLNGSLAKEEIVIRSENLTNNAKIIIVHLHTPVEIVCTRPNNNTRKSVRIGPGQTFYATGDIIGDPRKAHCNISEKDWNKTLQEVGKELQKHFPNKTIRYNQSAGGRMEITTHSFNCGGEFFYCNTSKLFNSTYNDTYISTNSSANNSSTITLQCRIKQIINMWQGVGRCMYAPPIAGNITCKSNITGLLLTRDGGPDSNETETFRPAGGDMRDNWRSELYKYKVVKIEPLGVAPTRCKRRVVGRRRRRRAVGIGAVFLGFLGAAGSTMGAASMTLTVQARNLLSGIVQQQSNLLRAPEAQQHLLKLTVWGIKQLQARVLAVERYLRDQQLLGIWGCSGKLICCTNVPWNSSWSNRNLSEIWDNMTWLQWDKEISNYTQIIYGLLEESQNQQEKNEQDLLALD

SEQ ID NO: 399 - protein, 668 aa, synthetic construct
MPMGSLQPLATLYLLGMLVASVLAAENLWVTVYYGVPVWKEAKTTLFCASDAKAYKKEVHNVWATHACVPTDPSPQELFLKNVTENFNMWKNDMVDQMHEDIISLWDQSLKPCVKLTPLCVTLICSNAIVKNSTTEEMSTALVKNSTTEAMKNCSFNTTTEIRDKEKKEYALFYRPDIVPLNNETGNISEYRLINCNTSACTQACPKVTFEPIPIHYCAPAGYAILKCNDETFNGTGPCSNVSTVQCTHGIRPVVSTQLLLNGSLAKEEIVIRSENLTNNAKIIIVHLHTPVEIVCTRPNNNTRKSVRIGPGQTFYATGDIIGDPRKAHCNISEKDWNKTLQEVGKELQKHFPNKTIRYNQSAGGDMEITTHSFNCGGEFFYCNTSKLFNSTYNDTYISTNSSANNSSTITLQCRIKQIINMWQGVGRCMYAPPIAGNITCKSNITGLLLTRDGGPDSNETETFRPAGGDMRDNWRSELYKYKVVKIEPLGVAPTRCKRRVVGRRRRRRAVGIGAVFLGFLGAAGSTMGAASMTLTVQARNLLSGIVQQQSNLLRAPEAQQHLLKLTVWGIKQLQARVLAVERYLRDQQLLGIWGCSGKLICCTNVPWNSSWSNRNLSEIWDNMTWLQWDKEISNYTQIIYGLLEESQNQQEKNEQDLLALDLPETGG

SEQ ID NO: 400 - protein, 830 aa, synthetic construct
MPMGSLQPLATLYLLGMLVASVLAAENLWVTVYYGVPVWKEAKTTLFCASDAKAYKKEVHNVWATHACVPTDPSPQELFLKNVTENFNMWKNDMVDQMHEDIISLWDQSLKPCVKLTPLCVTLICSNAIVKNSTTEEMSTALVKNSTTEAMKNCSFNTTTEIRDKEKKEYALFYRPDIVPLNNETGNISEYRLINCNTSACTQACPKVTFEPIPIHYCAPAGYAILKCNDETFNGTGPCSNVSTVQCTHGIRPVVSTQLLLNGSLAKEEIVIRSENLTNNAKIIIVHLHTPVEIVCTRPNNNTRKSVRIGPGQTFYATGDIIGDPRKAHCNISEKDWNKTLQEVGKELQKHFPNKTIRYNQSAGGDMEITTHSFNCGGEFFYCNTSKLFNSTYNDTYISTNSSANNSSTITLQCRIKQIINMWQGVGRCMYAPPIAGNITCKSNITGLLLTRDGGPDSNETETFRPAGGDMRDNWRSELYKYKVVKIEPLGVAPTRCKRRVVGRRRRRRAVGIGAVFLGFLGAAGSTMGAASMTLTVQARNLLSGIVQQQSNLLRAPEAQQHLLKLTVWGIKQLQARVLAVERYLRDQQLLGIWGCSGKLICCTNVPWNSSWSNRNLSEIWDNMTWLQWDKEISNYTQIIYGLLEESQNQQEKNEQDLLALDGGGSGDIIKLLNEQVNKEMNSSNLYMSMSSWCYTHSLDGAGLFLFDHAAEEYEHAKKLIIFLNENNVPVQLTSISAPEHKFEGLTQIFQKAYEHEQHISESINNIVDHAIKSKDHATFNFLQWYVAEQHEEEVLFKDILDKIELIGNENHGLYLADQYVKGIAKSRKS

SEQ ID NO: 401 - protein, 641 aa, synthetic construct
AENLWVTVYYGVPVWKEAKTTLFCASDARAYEKEVHNVWATHACVPTDPSPQELVLGNVTENFNMWKNDMVDQMHEDIISLWDQSLKPCVKLTPLCVTLICSNATVNNRTAYDTRSNVNVTSINNTIMGEMKNCSFNTTTEIRDKEKKEYALFYKPDIVPLSETNNTSEYRLINCNTSACTQACPKVTFEPIPIHYCAPAGYAILKCNDETFNGTGPCSNVSTVQCTHGIRPVVSTQLLLNGSLAEKEIVIRSENLTNNAKIIIVHLHTPVEIVCTRPNNNTRKSVRIGPGQTFYATGDIIGDIKQAHCNISEEKWNDTLQKVGIELQKHFPNKTIKYNQSAGGDMEITTHSFNCGGEFFYCNTSNLFNGTYNGTYISTNSSANSTSTITLQCRIKQIINMWQGVGRCMYAPPIAGNITCRSNITGLLLTRDGGTNSNETETFRPAGGDMRDNWRSELYKYKVVKIEPLGVAPTRCKRRVVGRRRRRRAVGIGAVFLGFLGAAGSTMGAASMTLTVQARNLLSGIVQQQSNLLRAPEAQQHLLKLTVWGIKQLQARVLAVERYLRDQQLLGIWGCSGKLICCTNVPWNSSWSNRNLSEIWDNMTWLQWDKEISNYTQIIYGLLEESQNQQEKNEQDLLALD

SEQ ID NO: 402 - protein, 642 aa, synthetic construct
AENLWVTVYYGVPVWKEAKTTLFCASDAKAYKKEVHNVWATHACVPTDPSPQELFLKNVTENFNMWKNDMVDQMHEDIISLWDQSLKPCVKLTPLCVTLICSNATVNNRTAYDTRSNVNVTSINNTIMGEMKNCSFNTTTEIRDKEKKEYALFYRPDIVPLNNETGNISEYRLINCNTSACTQACPKVTFEPIPIHYCAPAGYAILKCNDETFNGTGPCSNVSTVQCTHGIRPVVSTQLLLNGSLAKEEIVIRSENLTNNAKIIIVHLHTPVEIVCTRPNNNTRKSVRIGPGQTFYATGDIIGDPRKAHCNISEKDWNKTLQEVGKELQKHFPNKTIRYNQSAGGDMEITTHSFNCGGEFFYCNTSKLFNSTYNDTYISTNSSANNSSTITLQCRIKQIINMWQGVGRCMYAPPIAGNITCKSNITGLLLTRDGGPDSNETETFRPAGGDMRDNWRSELYKYKVVKIEPLGVAPTRCKRRVVGRRRRRRAVGIGAVFLGFLGAAGSTMGAASMTLTVQARNLLSGIVQQQSNLLRAPEAQQHLLKLTVWGIKQLQARVLAVERYLRDQQLLGIWGCSGKLICCTNVPWNSSWSNRNLSEIWDNMTWLQWDKEISNYTQIIYGLLEESQNQQEKNEQDLLALD

SEQ ID NO: 403 - protein, 624 aa, synthetic construct
AENLWVTVYYGVPVWKEAKTTLFCASDARAYEKEVHNVWATHACVPTDPSPQELVLGNVTENFNMWKNDMVDQMHEDIISLWDQSLKPCVKLTPLCVTLICSNATVKNGTVEEMKNCSFNTTTEIRDKEKKEYALFYKPDIVPLSETNNTSEYRLINCNTSACTQACPKVTFEPIPIHYCAPAGYAILKCNDETFNGTGPCSNVSTVQCTHGIRPVVSTQLLLNGSLAEKEIVIRSENLTNNAKIIIVHLHTPVEIVCTRPNNNTRKSVRIGPGQTFYATGDIIGDIKQAHCNISEEKWNDTLQKVGIELQKHFPNKTIKYNQSAGGDMEITTHSFNCGGEFFYCNTSNLFNGTYNGTYISTNSSANSTSTITLQCRIKQIINMWQGVGRCMYAPPIAGNITCRSNITGLLLTRDGGTNSNETETFRPAGGDMRDNWRSELYKYKVVKIEPLGVAPTRCKRRVVGRRRRRRAVGIGAVFLGFLGAAGSTMGAASMTLTVQARNLLSGIVQQQSNLLRAPEAQQHLLKLTVWGIKQLQARVLAVERYLRDQQLLGIWGCSGKLICCTNVPWNSSWSNRNLSEIWDNMTWLQWDKEISNYTQIIYGLLEESQNQQEKNEQDLLALD

SEQ ID NO: 404 - protein, 127 aa, synthetic construct
QVQLVQSGAEVKKPGASVKVSCKASGYTFTDYYIHWVRQAPGQGLEWMGWINPNTGRTNSAQKFQGRVTMTRDTSISTAYMELSRLRSDDTAVYYCATGGWIGLYYDSSGYPNFDYWGQGTLVTVSS

SEQ ID NO: 405 - protein, 127 aa, synthetic construct
QVQLVQSGAEVKKPGASVKVSCKASGYTFTDYYIHWVRQAPGQGLEWMGWINPNTGRTNSAQKFQGRVTMTRDTSISTAYMELSRLRSDDTAVYYCARGGWIGLYVDYSGYPNFDYWGQGTLVTVSS

SEQ ID NO: 406 - protein, 110 aa, synthetic construct; identical to SEQ ID NO: 16

SEQ ID NO: 407 - protein, 22 aa, Homo sapiens
MGSLQPLATLYLLGMLVASVLA